(19) United States
(12) Patent Application Publication
(10) Pub. No.: US 2023/0082623 A1
(43) Pub. Date: Mar. 16, 2023

(54) TREATMENT OF DISEASES RELATED TO ATP-BINDING CASSETTE TRANSPORTER 1 DYSFUNCTION USING TREM2 AGONISTS

(71) Applicant: Vigil Neuroscience, Inc., Cambridge, MA (US)

(72) Inventors: Spyridon PAPAPETROPOULOS, Weston, MA (US); Richard FISHER, Cambridge, MA (US); Matthew BRENNAN, Andover, MA (US)

(21) Appl. No.: 17/457,727

(22) Filed: Dec. 6, 2021

Related U.S. Application Data
(60) Provisional application No. 63/121,404, filed on Dec. 4, 2020.

(51) Int. Cl. C07K 16/28; A61K 31/739; A61K 38/17; A61P 25/00

(52) U.S. Cl. CPC C07K 16/2803; A61K 31/739; C07K 2317/75; A61P 25/00; C07K 2317/24; A61K 38/1709

(57) ABSTRACT

The present invention provides a method of treating a disease or disorder caused by and/or associated with ABCD1 dysfunction in a human patient, the method comprising administering to the patient in need thereof an effective amount of a compound that increases the activity of triggering receptor expressed on myeloid cells 2 (TREM2). In some embodiments, compound that increases the activity of TREM2 is an agonist of TREM2. In some embodiments, the agonist of TREM2 is a small molecule agonist of TREM2 or an antibody agonist of TREM2.

### SEQUENCE LISTING

[0001] The instant application contains a Sequence Listing which has been submitted electronically in ASCII format and is hereby incorporated by reference in its entirety. Said ASCII copy, created on Nov. 30, 2021, is named 403433_006 US_SL.txt and is 2,755,371 bytes in size.

### TECHNICAL FIELD OF THE INVENTION

[0002] The present invention relates to compounds and methods of use thereof for treating diseases and disorders caused by ATP-binding cassette transporter 1 (ABCD1) dysfunction.

### BACKGROUND OF THE INVENTION

[0003] Microglia are brain-resident macrophages with many homeostatic and injury responsive roles, including trophic and phagocytic functions. Microglia are highly dependent on peroxidation for maintaining normal function. The ATP-binding cassette transporter 1 (ABCD1) gene encodes a key peroxisomal protein responsible for transport of activated very long chain fatty acids (VLCFA) into the peroxisome for further degradation and beta-oxidation for energy production. Therefore, mutations in the ABCD1 gene can lead to microglial dysfunction and damage due to accumulation of VLCFA, resulting in neurological and adrenal gland diseases and disorders. X-linked adrenoleukodystrophy (X-ALD) is one such condition associated with ABCD1 mutations, characterized by cerebral and spinal cord white matter degeneration with demyelination and adrenal insufficiency, which lead to progressive cognitive and motor dysfunction and ultimately death. To date, there are no known treatments for diseases and disorders caused by ABCD1 dysfunction, and patients are usually treated by managing the symptoms of the disease. Therefore, there remains a need in the art for methods of treating diseases and disorders caused by ABCD1 loss of function mutations.

### SUMMARY OF THE INVENTION

[0004] In one aspect, the present invention provides a method of treating a disease or disorder caused by and/or associated with a dysfunction in ABCD1 in a human patient, the method comprising administering to the patient an effective amount of a compound that increases the activity of triggering receptor expressed on myeloid cells 2 (TREM2). In some embodiments, the compound that increases the activity of TREM2 is an agonist of TREM2. In some embodiments, the agonist of TREM2 is a small molecule agonist of TREM2 or an antibody agonist of TREM2. In some embodiments, the disease or disorder caused by and/or associated with a dysfunction in ABCD1 is x-ALD.

### DETAILED DESCRIPTION OF CERTAIN EMBODIMENTS

### TREM2, ABCD1 and X-ALD

[0005] TREM2 is a member of the Ig superfamily of receptors that is expressed on cells of myeloid lineage, including macrophages, dendritic cells, and microglia (Schmid et al., Journal of Neurochemistry, Vol. 83: 1309-1320, 2002; Colonna, Nature Reviews Immunology, Vol. 3: 445-453, 2003; Kiialainen et al., Neurobiology of Disease, 2005, 18: 314-322). TREM2 is an innate immune receptor that binds many endogenous substrates, and signals through a short intracellular domain that complexes with the adaptor protein DAP12, the cytoplasmic domain of which comprises an ITAM motif (Bouchon et al., The Journal of Experimental Medicine, 2001, 194: 1111-1122). Upon activation of TREM2, tyrosine residues within the ITAM motif in DAP12 are phosphorylated by the Src family of kinases, providing docking sites for the tyrosine kinase ζ-chain-associated protein 70 (ZAP70) and spleen tyrosine kinase (Syk) via their SH2 domains (Colonna, Nature Reviews Immunology, 2003, 3:445-453; Ulrich and Holtzman, ACS Chem. Neurosci., 2016, 7:420-427). The ZAP70 and Syk kinases induce activation of several downstream signaling cascades, including phosphatidylinositol 3-kinase (PI3K), protein kinase C (PKC), extracellular regulated kinase (ERK), and elevation of intracellular calcium (Colonna, Nature Reviews Immunology, 2003, 3:445-453; Ulrich and Holtzman, ACS Chem. Neurosci., 2016, 7:420-427). The wild-type human TREM2 amino acid sequence is provided as SEQ ID NO: 1.

[0006] TREM2 has been implicated in several myeloid cell processes, including phagocytosis, proliferation, survival, and regulation of inflammatory cytokine production (Ulrich and Holtzman, ACS Chem. Neurosci., 2016, 7: 420-427). One of the key TREM2 functions is regulating myeloid cell number. Knocking down expression of TREM2 in primary microglia using translation blockers leads to reduced cell number (Zheng, et al., Neurobiol. Aging, 2016; 42: 132-141). Evidence suggests that in various contexts, TREM2 is important for myeloid cell survival, proliferation and chemotaxis, all of which could lead to disease-associated increases in myeloid cell number including microglia (Jay, et al., Mol Neurodegener. 2017; 12(1):56).

[0007] A well-characterized function of TREM2 is to enhance phagocytosis. TREM2 is expressed in a subset of myeloid cells within the CNS that have high phagocytic capacity (Bisht et al., Glia. 2016; 64: 826-839). Across numerous in vitro studies, loss of TREM2 results in reduced phagocytosis of a variety of substrates, including apoptotic neurons or neuronal cell lines (Takahashi et al., Exp Med. 2005; 201(4):647-657.; Hsieh et al., J Neurochem. 2009; 109(4): 1144-1156). Conversely, TREM2 activation or overexpression enhanced uptake of these substrates (Takahashi et al., J Exp Med. 2005; 201(4):647-657; Takahashi et al., PLoS Med. 2007; 4(4):e124; Jiang et al., Neuropsychopharmacology. 2014; 39(13): 2949-2962.). TREM2 is important for clearance of myelin debris in experimental autoimmune encephalomyelitis (EAE) (Takahashi et al., PLoS Med. 2007; 4(4):e124) and peri-infarct tissue in mice following middle coronary artery occlusion (MCAO) (Kawabori et al., J Neurosci. 2015; 35(8): 3384-3396).

[0008] TREM2 has been classically described as being anti-inflammatory and several in vitro and in vivo studies are supportive of an anti-inflammatory role for TREM2 in certain contexts (Yin et al., Traffic. 2016; 17(12): 1286-1296). Knocking down TREM2 in cell lines increases levels of proinflammatory mediators such as iNOS, TNFα, IL1β and IL6 (Yin et al., Traffic. 2016; 17(12): 1286-1296) in response to apoptotic neuronal membrane debris (Takahashi et al., J Exp Med. 2005; 201(4):647-657.), TLR ligands (Turnbull et al., J Immunol. 2006; 177(6):3520-3524.), including LPS (Gawish et al., FASEB J. 2015 Apr.; 29(4):1247-1257.; Gao et al., Mol Med Rep. 2013 March; 7(3):921-926.; Takahashi et al., PLoS Med. 2007; 4(4):e124.) and A1342 (Jiang et al., Neuropsychopharmacology. 2014; 39(13): 2949-2962.). Moreover, overexpressing TREM2 in cell lines or amyloid (Jiang et al., Neuropsychopharmacology. 2014; 39(13): 2949-2962.) and tau mouse models of AD (Jiang et al., Neuropharmacology. 2016; 105:196-206.) reduced levels of these pro-inflammatory transcripts. Together, these studies suggest that in some contexts, TREM2 can attenuate inflammatory responses.

[0009] TREM2 has been linked to several serious diseases. For instance, mutations in both TREM2 and DAP12 have been linked to the autosomal recessive disorder Nasu-Hakola Disease, which is characterized by bone cysts, muscle wasting and demyelination phenotypes (Guerreiro et al., New England Journal of Medicine, 2013, 368: 117-127). Variants in the TREM2 gene have been linked to increased risk for Alzheimer's disease (AD) and other forms of dementia including frontotemporal dementia and amyotrophic lateral sclerosis (Jonsson et al., New England Journal of Medicine, 2013, 368:107-116; Guerreiro et al., JAMA Neurology, 2013, 70:78-84; Jay et al., Journal of Experimental Medicine, 2015, 212: 287-295; Cady et al., JAMA Neurol. 2014 April; 71(4):449-53). Impairment in microgliosis has been reported in animal models of prion disease, multiple sclerosis, and stroke, suggesting that TREM2 may play an important role in supporting microgliosis in response to pathology or damage in the central nervous system (Ulrich and Holtzman, ACS Chem. Neurosci., 2016, 7: 420-427).

[0010] The ABCD1 gene provides instructions for producing the adrenoleukodystrophy protein (ALDP). ABCD1 (ALDP) maps to Xq28. ABCD1 is a member of the ATP-binding cassette (ABC) transporter superfamily. The superfamily contains membrane proteins that translocate a wide variety of substrates across extra- and intracellular membranes, including metabolic products, lipids and sterols, and drugs. ALDP is located in the membranes of cell structures called peroxisomes. Peroxisomes are small sacs within cells that process many types of molecules. ALDP brings a group of fats called very long-chain fatty acids (VLCFAs) into peroxisomes, where they are broken down. As ABCD1 is highly expressed in microglia, it is possible that microglial dysfunction and their close interaction with other cell types actively participates in neurodegenerative processes (Gong et al., Annals of Neurology. 2017; 82(5):813-827.). It has been shown that severe microglia loss and damage is an early feature in patients with cerebral form of X-linked ALD (cALD) carrying ABCD1 mutations (Bergner et al., Glia. 2019; 67: 1196-1209). It has also been shown that ABCD1-deficiency leads to an impaired plasticity of myeloid lineage cells that is reflected in incomplete establishment of anti-inflammatory responses, thus possibly contributing to the devastating rapidly progressive demyelination in cerebral adrenoleukodystrophy (Weinhor et al., BRAIN 2018: 141; 2329-2342). It has also been shown in a recent report of 83 young males with cALD that patients harboring the APOE4 allele, a known ligand of TREM2, have an increased burden of cerebral disease involvement as determined by Loes score, gadolinium intensity score (GIS), and neurologic function score (NFS) (Orchard et al., Nature Scientific Reports 2019 9:7858). These findings emphasize microglia/monocytes/macrophages as crucial therapeutic targets for preventing or stopping myelin destruction in patients with X-linked adrenoleukodystrophy.

[0011] The present invention relates to the unexpected discovery that administration of a TREM2 agonist can rescue the loss of microglia in cells having mutations in the ABCD1 gene. It has been previously shown that TREM2 agonist antibody 4D9 increases ATP luminescence (a measure of cell number and activity) in a dose dependent manner when the levels of M-CSF in media are reduced to 5 ng/mL (Schlepckow et al, EMBO Mol Med., 2020) and that TREM2 agonist AL002c increases ATP luminescence when M-CSF is completely removed from the media (Wang et al, J. Exp. Med.; 2020, 217(9): e20200785). This finding suggests that TREM2 agonism can compensate for deficiency in ABCD1 function leading to sustained activation, proliferation, chemotaxis of microglia, maintenance of anti-inflammatory environment and reduced astrocytosis caused by a decrease in ABCD1 and accumulation of VLCFAs. The present invention relates to the unexpected discovery that activation of TREM2 can rescue microglia harboring the ABCD1 mutation and challenged with an increase in VLCFA, and that this effect may be also observed in patients suffering from loss of functional microglia due to ABCD1 mutation. This discovery has not been previously taught or suggested in the available art.

[0012] To date, no prior study has shown that TREM2 agonism can rescue the loss of microglia in cells where mutations in the ABCD1 and a VLCFA increase is present. No prior study has taught or suggested that reversal of the loss of microglia due to an ABCD1 mutation through TREM2 agonism can be used to treat a disease or disorder caused by and/or associated with an ABCD1 mutation.

[0013] X-linked adrenoleukodystrophy (x-ALD) is an X chromosome-linked central nervous system disease caused by an ABCD1 mutation that manifests in the form of variable developmental behavioral, cognitive, motor and sensory function changes in patients suffering from the disease. Three main phenotypes are seen in affected males: (1) The childhood cerebral form manifests most commonly between ages four and eight years. It initially resembles attention-deficit disorder or hyperactivity; progressive impairment of cognition, behavior, vision, hearing, and motor function follow the initial symptoms and often lead to total disability within six months to two years and death within 5 years. (2) Adrenomyeloneuropathy (AMN) manifests most commonly between the second and fourth decades as progressive stiffness and weakness of the legs, sphincter disturbances, sexual dysfunction, and often, impaired adrenocortical function; all symptoms are progressive over decades. (3) “Addison disease only” presents with primary adrenocortical insufficiency between age two years and adulthood and most commonly by age 7.5 years, without evidence of neurologic abnormality. The cerebral childhood form of x-ALD also know as cerebral ALD (cALD) is characterized by patchy cerebral white matter abnormalities visible by magnetic resonance imaging. However, the clinical symptoms and MRI changes are not specific to cALD and are common for other neurological conditions, including Adult-onset leukoencephalopathy with axonal spheroids and pigmented glia (ALSP), Nasu-Hakola disease (NHD) and other leukodystrophies, making diagnosis and treatment of cALD very difficult.

[0014] Studies have discovered that x-ALD is a genetic disorder in which male patients that carry a loss of function mutation in the peroxisomal transporter gene ABCD1, leading to VLCFA increase and activation of inflammatory processes leading to demyelination and axonal degeneration. In one aspect, the present invention relates to the surprising discovery that activation of the TREM2 pathway can rescue the loss of microglia in patients carrying ABCD1 mutations, preventing microglia apoptosis, thereby treating ABCD1-related conditions, such as, but not limited to, x-ALD.

[0015] The present invention also relates to the surprising discovery that neurofilament light chain and neurofilament heavy chain proteins can serve as a therapeutic biomarker to determine treatment efficacy in patients suffering from a disease or disorder caused by and/or associated with a ABCD1 dysfunction, such as x-ALD. Neurofilament light chain (NfL) is highly elevated in the plasma, serum and CSF of patients with x-ALD, (van Ballegoij, et al., Ann Clin Transl Neurol, 7: 2127-2136.). cALD is characterized by severe and rapid myelin breakdown followed by neurodegeneration. Mice exposed to cuprizone, a model of acute demyelination, show elevations in plasma NfL (Taylor Meadows et al, European Charcot Foundation 25th Annual Meeting; November 30-Dec. 2, 2017; Baveno, Italy). Additionally, TREM2 knockout mice exposed to cuprizone show increased neurotoxicity and further increases in plasma and CSF NfL (Nugent et al, Neuron; 2020, 105(5): 837-854; O'Loughlin et al, Poster #694 ADPD Symposium, Lisbon Portugal, April 2019.). Patients with cALD have quantitatively fewer microglia than healthy individuals in multiple regions of the brain (Bergner et al., Glia. 2019; 67(6):1196-1209). The present invention relates to the unexpected discovery that neurofilament is broken down in the neurons of animals suffering from a disease or disorder caused by and/or associated with a ABCD1 dysfunction, such as x-ALD, resulting in an increase in neurofilament breakdown products in the plasma, serum and cerebral spinal fluid (CSF), and that efficacy of treatment of the disease or disorder with a TREM2 agonist can be determined by measuring central levels of neurofilament and central nervous system (CNS), plasma and serum levels of its degradation products, namely neurofilament light chain and neurofilament heavy chain proteins. In one aspect, the present invention provides methods for selecting x-ALD patients that are likely to experience progression of their neurodegenerative or other disease phenotypes based on neurofilament light chain or neurofilament heavy chain levels, thereby informing the timing of treatment with a TREM2 agonist.

### Definitions

[0016] Unless defined otherwise, all technical and scientific terms used herein have the same meaning as commonly understood by one of ordinary skill in the art. Accordingly, the following terms are intended to have the following meanings.

[0017] “Agonist” or an “activating” agent, such as a compound or antibody, is an agent that induces (e.g., increases) one or more activities or functions of the target (e.g., TREM2) of the agent after the agent binds the target.

[0018] “Antagonist” or a “blocking” agent, such as a compound or antibody, is an agent that reduces or eliminates (e.g., decreases) binding of the target to one or more ligands after the agent binds the target, and/or that reduces or eliminates (e.g., decreases) one or more activities or functions of the target after the agent binds the target. In some embodiments, antagonist agent, or blocking agent substantially or completely inhibits target binding to one or more of its ligand and/or one or more activities or functions of the target.

[0019] “Antibody” is used in the broadest sense and refers to an immunoglobulin or fragment thereof, and encompasses any such polypeptide comprising an antigen-binding fragment or region of an antibody. The recognized immunoglobulin genes include the kappa, lambda, alpha, gamma, delta, epsilon and mu constant region genes, as well as myriad immunoglobulin variable region genes. Light chains are generally classified as either kappa or lambda. Heavy chains are classified as gamma, mu, alpha, delta, or epsilon, which in turn define the immunoglobulin classes, IgG, IgM, IgA, IgD and IgE, respectively. Immunoglobulin classes may also be further classified into subclasses, including IgG subclasses IgG₁, IgG₂, IgG₃, and IgG₄; and IgA subclasses IgA₁ and IgA₂. The term includes, but is not limited to, polyclonal, monoclonal, monospecific, multispecific (e.g., bispecific antibodies), natural, humanized, human, chimeric, synthetic, recombinant, hybrid, mutated, grafted, antibody fragments (e.g., a portion of a full-length antibody, generally the antigen binding or variable region thereof, e.g., Fab, Fab′, F(ab′)2, and Fv fragments), and in vitro generated antibodies so long as they exhibit the desired biological activity. The term also includes single chain antibodies, e.g., single chain Fv (sFv or scFv) antibodies, in which a variable heavy and a variable light chain are joined together (directly or through a peptide linker) to form a continuous polypeptide.

[0020] “Isolated” refers to a change from a natural state, that is, changed and/or removed from its original environment. For example, a polynucleotide or polypeptide (e.g., an antibody) is isolated when it is separated from material with which it is naturally associated in the natural environment. Thus, an “isolated antibody” is one which has been separated and/or recovered from a component of its natural environment.

[0021] “Purified antibody” refers to an antibody preparation in which the antibody is at least 80% or greater, at least 85% or greater, at least 90% or greater, at least 95% or greater by weight as compared to other contaminants (e.g., other proteins) in the preparation, such as by determination using SDS-polyacrylamide gel electrophoresis (PAGE) or capillary electrophoresis- (CE) SDS under reducing or non-reducing conditions.

[0022] “Extracellular domain” and “ectodomain” are used interchangeably when used in reference to a membrane bound protein and refer to the portion of the protein that is exposed on the extracellular side of a lipid membrane of a cell.

[0023] “Binds specifically” in the context of any binding agent, e.g., an antibody, refers to a binding agent that binds specifically to an antigen or epitope, such as with a high affinity, and does not significantly bind other unrelated antigens or epitopes.

[0024] “Functional” refers to a form of a molecule which possesses either the native biological activity of the naturally existing molecule of its type, or any specific desired activity, for example as judged by its ability to bind to ligand molecules. Examples of “functional” polypeptides include an antibody binding specifically to an antigen through its antigen-binding region.

[0025] “Antigen” refers to a substance, such as, without limitation, a particular peptide, protein, nucleic acid, or carbohydrate which can bind to a specific antibody.

[0026] “Epitope” or “antigenic determinant” refers to that portion of an antigen capable of being recognized and specifically bound by a particular antibody. When the antigen is a polypeptide, epitopes can be formed from contiguous amino acids and/or noncontiguous amino acids juxtaposed by tertiary folding of a protein. Linear epitope is an epitope formed from contiguous amino acids on the linear sequence of amino acids. A linear epitope may be retained upon protein denaturing. Conformational or structural epitope is an epitope composed of amino acid residues that are not contiguous and thus comprised of separated parts of the linear sequence of amino acids that are brought into proximity to one another by folding of the molecule, such as through secondary, tertiary, and/or quaternary structures. A conformational or structural epitope may be lost upon protein denaturation. In some embodiments, an epitope can comprise at least 3, and more usually, at least 5 or 8-10 amino acids in a unique spatial conformation. Thus, an epitope as used herein encompasses a defined epitope in which an antibody binds only portions of the defined epitope. There are many methods known in the art for mapping and characterizing the location of epitopes on proteins, including solving the crystal structure of an antibody-antigen complex, competition assays, gene fragment expression assays, mutation assays, and synthetic peptide-based assays, as described, for example, in Using Antibodies: A Laboratory Manual, Chapter 11, Harlow and Lane, eds., Cold Spring Harbor Laboratory Press, Cold Spring Harbor, N.Y. (1999).

[0027] “Protein,” “polypeptide,” or “peptide” denotes a polymer of at least two amino acids covalently linked by an amide bond, regardless of length or post-translational modification (e.g., glycosylation, phosphorylation, lipidation, myristoylation, ubiquitination, etc.). Included within this definition are D- and L-amino acids, and mixtures of D- and L-amino acids. Unless specified otherwise, the amino acid sequences of a protein, polypeptide, or peptide are displayed herein in the conventional N-terminal to C-terminal orientation.

[0028] “Polynucleotide” and “nucleic acid” are used interchangeably herein and refer to two or more nucleosides that are covalently linked together. The polynucleotide may be wholly comprised of ribonucleosides (i.e., an RNA), wholly comprised of 2′ deoxyribonucleotides (i.e., a DNA) or mixtures of ribo- and 2′ deoxyribonucleosides. The nucleosides will typically be linked together by sugar-phosphate linkages (sugar-phosphate backbone), but the polynucleotides may include one or more non-standard linkages. Non-limiting example of such non-standard linkages include phosphoramidates, phosphorothioates, and amides (see, e.g., Eckstein, F., Oligonucleotides and Analogues: A Practical Approach, Oxford University Press (1992)).

[0029] “Operably linked” or “operably associated” refers to a situation in which two or more polynucleotide sequences are positioned to permit their ordinary functionality. For example, a promoter is operably linked to a coding sequence if it is capable of controlling the expression of the sequence. Other control sequences, such as enhancers, ribosome binding or entry sites, termination signals, polyadenylation sequences, and signal sequences are also operably linked to permit their proper function in transcription or translation.

[0030] “Amino acid position” and “amino acid residue” are used interchangeably to refer to the position of an amino acid in a polypeptide chain. In some embodiments, the amino acid residue can be represented as “XN”, where X represents the amino acid and the N represents its position in the polypeptide chain. Where two or more variations, e.g., polymorphisms, occur at the same amino acid position, the variations can be represented with a “I” separating the variations. A substitution of one amino acid residue with another amino acid residue at a specified residue position can be represented by XNY, where X represents the original amino acid, N represents the position in the polypeptide chain, and Y represents the replacement or substitute amino acid. When the terms are used to describe a polypeptide or peptide portion in reference to a larger polypeptide or protein, the first number referenced describes the position where the polypeptide or peptide begins (i.e., amino end) and the second referenced number describes where the polypeptide or peptide ends (i.e., carboxy end).

[0031] “Polyclonal” antibody refers to a composition of different antibody molecules which is capable of binding to or reacting with several different specific antigenic determinants on the same or on different antigens. A polyclonal antibody can also be considered to be a “cocktail of monoclonal antibodies.” The polyclonal antibodies may be of any origin, e.g., chimeric, humanized, or fully human.

[0032] “Monoclonal antibody” refers to an antibody obtained from a population of substantially homogeneous antibodies, i.e., the individual antibodies comprising the population are identical except for possible naturally occurring mutations that may be present in minor amounts. Each monoclonal antibody is directed against a single determinant on the antigen. In some embodiments, monoclonal antibodies to be used in accordance with the present disclosure can be made by the hybridoma method described by Kohler et al., 1975, Nature 256:495-7, or by recombinant DNA methods. The monoclonal antibodies can also be isolated, e.g., from phage antibody libraries.

[0033] “Chimeric antibody” refers to an antibody made up of components from at least two different sources. A chimeric antibody can comprise a portion of an antibody derived from a first species fused to another molecule, e.g., a portion of an antibody derived from a second species. In some embodiments, a chimeric antibody comprises a portion of an antibody derived from a non-human animal, e.g., mouse or rat, fused to a portion of an antibody derived from a human. In some embodiments, a chimeric antibody comprises all or a portion of a variable region of an antibody derived from a non-human animal fused to a constant region of an antibody derived from a human.

[0034] “Humanized antibody” refers to an antibody that comprises a donor antibody binding specificity, e.g., the CDR regions of a donor antibody, such as a mouse monoclonal antibody, grafted onto human framework sequences. A “humanized antibody” typically binds to the same epitope as the donor antibody.

[0035] “Fully human antibody” or “human antibody” refers to an antibody that comprises human immunoglobulin protein sequences only. A fully human antibody may contain murine carbohydrate chains if produced in a non-human cell, e.g., a mouse, in a mouse cell, or in a hybridoma derived from a mouse cell.

[0036] “Full-length antibody,” “intact antibody” or “whole antibody” are used interchangeably to refer to an antibody, such as an anti-TREM2 antibody of the present disclosure, in its substantially intact form, as opposed to an antibody fragment. Specifically whole antibodies include those with heavy and light chains including an Fc region. The constant domains may be native sequence constant domains {e.g., human native sequence constant domains) or amino acid sequence variants thereof. In some cases, the intact antibody may have one or more effector functions.

[0037] “Antibody fragment” or “antigen-binding moiety” refers to a portion of a full length antibody, generally the antigen binding or variable domain thereof. Examples of antibody fragments include Fab, Fab′, F(ab′)2, and Fv fragments; diabodies; linear antibodies; single-chain antibodies; and multispecific antibodies formed from antibody fragments that bind two or more different antigens. Several examples of antibody fragments containing increased binding stoichiometries or variable valencies (2, 3 or 4) include triabodies, trivalent antibodies and trimerbodies, tetrabodies, tandAbs®, di-diabodies and (sc(Fv)2)₂ molecules, and all can be used as binding agents to bind with high affinity and avidity to soluble antigens (see, e.g., Cuesta et al., 2010, Trends Biotech. 28:355-62).

[0038] “Single-chain Fv” or “sFv” antibody fragment comprises the VH and VL domains of an antibody, where these domains are present in a single polypeptide chain. Generally, the Fv polypeptide further comprises a polypeptide linker between the VH and VL domains which enables the sFv to form the desired structure for antigen binding. For a review of sFv, see Pluckthun in The Pharmacology of Monoclonal Antibodies, Vol. 113, pp. 269-315, Rosenberg and Moore, eds., Springer-Verlag, New York (1994).

[0039] “Diabodies” refers to small antibody fragments with two antigen-binding sites, which comprise a heavy chain variable domain (VH) connected to a light chain variable domain (VL) in the same polypeptide chain (VH-VL). By using a linker that is short to allow pairing between the two domains on the same chain, the domains are forced to pair with the complementary domains of another chain and create two antigen-binding sites.

[0040] “Antigen binding domain” or “antigen binding portion” refers to the region or part of the antigen binding molecule that specifically binds to and complementary to part or all of an antigen. In some embodiments, an antigen binding domain may only bind to a particular part of the antigen (e.g., an epitope), particularly where the antigen is large. An antigen binding domain may comprise one or more antibody variable regions, particularly an antibody light chain variable region (VL) and an antibody heavy chain variable region (VH), and particularly the complementarity determining regions (CDRs) on each of the VH and VL chains.

[0041] “Variable region” and “variable domain” are used interchangeably to refer to the polypeptide region that confers the binding and specificity characteristics of each particular antibody. The variable region in the heavy chain of an antibody is referred to as “VH” while the variable region in the light chain of an antibody is referred to as “VL”. The major variability in sequence is generally localized in three regions of the variable domain, denoted as “hypervariable regions” or “CDRs” in each of the VL region and VH region, and forms the antigen binding site. The more conserved portions of the variable domains are referred to as the framework region FR.

[0042] “Complementarity-determining region” and “CDR” are used interchangeably to refer to non-contiguous antigen binding regions found within the variable region of the heavy and light chain polypeptides of an antibody molecule. In some embodiments, the CDRs are also described as “hypervariable regions” or “HVR”. Generally, naturally occurring antibodies comprise six CDRs, three in the VH (referred to as: CDR H1 or H1; CDR H2 or H2; and CDR H3 or H3) and three in the VL (referred to as: CDR L1 or L1; CDR L2 or L2; and CDR L3 or L3). The CDR domains have been delineated using various approaches, and it is to be understood that CDRs defined by the different approaches are to be encompassed herein. The “Kabat” approach for defining CDRS uses sequence variability and is the most commonly used (Kabat et al., 1991, “Sequences of Proteins of Immunological Interest, 5^{th} Ed.” NIH 1:688-96). “Chothia” uses the location of structural loops (Chothia and Lesk, 1987, J Mol Biol. 196:901-17). CDRS defined by “AbM” are a compromise between the Kabat and Chothia approach, and can be delineated using Oxford Molecular AbM antibody modeling software (see, Martin et al., 1989, Proc. Natl Acad Sci USA. 86:9268; see also, world wide web www.bioinf-org.uk/abs). The “Contact” CDR delineations are based on analysis of known antibody-antigen crystal structures (see, e.g., MacCallum et al., 1996, J. Mol. Biol. 262, 732-45). The CDRS delineated by these methods typically include overlapping or subsets of amino acid residues when compared to each other.

[0043] It is to be understood that the exact residue numbers which encompass a particular CDR will vary depending on the sequence and size of the CDR, and those skilled in the art can routinely determine which residues comprise a particular CDR given the amino acid sequence of the variable region of an antibody.

[0044] Kabat, supra, also defined a numbering system for variable domain sequences that is applicable to any antibody. The Kabat numbering system is generally used when referring to a residue in the variable domain (approximately residues 1-107 of the light chain and residues 1-113 of the heavy chain) (e.g., Kabat et al., Sequences of Immunological Interest. 5th Ed. Public Health Service, National Institutes of Health, Bethesda, Md. (1991)). The “EU or, Kabat numbering system” or “EU index” is generally used when referring to a residue in an immunoglobulin heavy chain constant region (e.g., the EU index reported in Kabat et al., supra). The “EU index as in Kabat” refers to the residue numbering of the human IgG1 EU antibody. References to residue numbers in the variable domain of antibodies means residue numbering by the Kabat numbering system. References to residue numbers in the constant domain of antibodies means residue numbering by the EU or, Kabat numbering system {e.g., see United States Patent Publication No. 2010-280227). One of skill in the art can assign this system of “Kabat numbering” to any variable domain sequence. Accordingly, unless otherwise specified, references to the number of specific amino acid residues in an antibody or antigen binding fragment are according to the Kabat numbering system.

[0045] “Framework region” or “FR region” refers to amino acid residues that are part of the variable region but are not part of the CDRS (e.g., using the Kabat, Chothia or AbM definition). The variable region of an antibody generally contains four FR regions: FR1, FR2, FR3 and FR4. Accordingly, the FR regions in a VL region appear in the following sequence: FR_{L}1-CDR L1-FR_{L}2-CDR L2-FR_{L}3-CDR L3-FR_{L}4, while the FR regions in a VH region appear in the following sequence: FR1_{H}-CDR H1-FR_{H}2-CDR H2-FR_{H}3-CDR H3-FR_{H}4.

[0046] “Constant region” or “constant domain” refers to a region of an immunoglobulin light chain or heavy chain that is distinct from the variable region. The constant domain of the heavy chain generally comprises at least one of: a CH1 domain, a Hinge (e.g., upper, middle, and/or lower hinge region), a CH2 domain, and a CH3 domain. In some embodiments, the antibody can have additional constant domains CH4 and/or CH5. In some embodiments, an antibody described herein comprises a polypeptide containing a CH1 domain; a polypeptide comprising a CH1 domain, at least a portion of a Hinge domain, and a CH2 domain; a polypeptide comprising a CH1 domain and a CH3 domain; a polypeptide comprising a CH1 domain, at least a portion of a Hinge domain, and a CH3 domain, or a polypeptide comprising a CH1 domain, at least a portion of a Hinge domain, a CH2 domain, and a CH3 domain. In some embodiments, the antibody comprises a polypeptide which includes a CH3 domain. The constant domain of a light chain is referred to a CL, and in some embodiments, can be a kappa or lambda constant region. However, it will be understood by one of ordinary skill in the art that these constant domains (e.g., the heavy chain or light chain) may be modified such that they vary in amino acid sequence from the naturally occurring immunoglobulin molecule.

[0047] “Fc region” or “Fc portion” refers to the C terminal region of an immunoglobulin heavy chain. The Fc region can be a native-sequence Fc region or a non-naturally occurring variant Fc region. Generally, the Fc region of an immunoglobulin comprises constant domains CH2 and CH3. Although the boundaries of the Fc region can vary, in some embodiments, the human IgG heavy chain Fc region can be defined to extend from an amino acid residue at position C226 or from P230 to the carboxy terminus thereof. In some embodiments, the “CH2 domain” of a human IgG Fc region, also denoted as “Cy2”, generally extends from about amino acid residue 231 to about amino acid residue 340. In some embodiments, N-linked carbohydrate chains can be interposed between the two CH2 domains of an intact native IgG molecule. In some embodiments, the CH3 domain” of a human IgG Fc region comprises residues C-terminal to the CH2 domain, e.g., from about amino acid residue 341 to about amino acid residue 447 of the Fc region. A “functional Fc region” possesses an “effector function” of a native sequence Fc region. Exemplary Fc “effector functions” include, among others, C1q binding; complement dependent cytotoxicity (CDC); Fc receptor binding; antibody dependent cell-mediated cytotoxicity (ADCC); phagocytosis; down regulation of cell-surface receptors (e.g., LT receptor); etc. Such effector functions generally require the Fc region to be combined with a binding domain (e.g., an antibody variable domain) and can be assessed using various assays known in the art.

[0048] “Native sequence Fc region” comprises an amino acid sequence identical to the amino acid sequence of an Fc region found in nature. Native sequence human Fc regions include a native sequence human IgG1 Fc region (non-A and A allotypes); native sequence human IgG2 Fc region; native sequence human IgG3 Fc region; and native sequence human IgG4 Fc region as well as naturally occurring variants thereof

[0049] “Variant Fc region” comprises an amino acid sequence which differs from that of a native sequence Fc region by virtue of at least one amino acid modification, preferably one or more amino acid substitution(s). Preferably, the variant Fc region has at least one amino acid substitution compared to a native sequence Fc region or to the Fc region of a parent polypeptide, e.g. from about one to about ten amino acid substitutions, and preferably from about one to about five amino acid substitutions in a native sequence Fc region or in the Fc region of the parent polypeptide. The variant Fc region herein will preferably possess at least about 80% homology with a native sequence Fc region and/or with an Fc region of a parent polypeptide, and most preferably at least about 90% homology therewith, more preferably at least about 95% homology therewith.

[0050] “Affinity-matured” antibody, such as an affinity matured anti-TREM2 antibody of the present disclosure, is one with one or more alterations in one or more HVRs thereof that result in an improvement in the affinity of the antibody for antigen, compared to a parent antibody that does not possess those alteration(s). In one embodiment, an affinity-matured antibody has nanomolar or even picomolar affinities for the target antigen. Affinity-matured antibodies are produced by procedures known in the art. For example, Marks et al., Bio/Technology, 1992, 10:779-783 describes affinity maturation by VH- and VL-domain shuffling. Random mutagenesis of HVR and/or framework residues is described by, for example: Barbas et al., Proc Nat. Acad. Sci. USA., 1994, 91:3809-3813; Schier et al. Gene, 1995, 169: 147-155; Yelton et al., Immunol., 1995, 155: 1994-2004; Jackson et al., Immunol., 1995, 154(7):3310-9; and Hawkins et al, J. Mol. Biol., 1992, 226:889-896.

[0051] “Binding affinity” refers to strength of the sum total of noncovalent interactions between a ligand and its binding partner. In some embodiments, binding affinity is the intrinsic affinity reflecting a one-to-one interaction between the ligand and binding partner. The affinity is generally expressed in terms of equilibrium association (K_{A}) or dissociation constant (K_{D}), which are in turn reciprocal ratios of dissociation (k_{off}) and association rate constants (kₒₙ).

[0052] “Percent (%) sequence identity” and “percentage sequence homology” are used interchangeably herein to refer to comparisons among polynucleotides or polypeptides, and are determined by comparing two optimally aligned sequences over a comparison window, wherein the portion of the polynucleotide or polypeptide sequence in the comparison window may comprise gaps as compared to the reference sequence for optimal alignment of the two sequences. The percentage may be calculated by determining the number of positions at which the identical nucleic acid base or amino acid residue occurs in both sequences to yield the number of matched positions, dividing the number of matched positions by the total number of positions in the window of comparison and multiplying the result by 100 to yield the percentage of sequence identity. Alternatively, the percentage may be calculated by determining the number of positions at which either the identical nucleic acid base or amino acid residue occurs in both sequences or a nucleic acid base or amino acid residue is aligned with a gap to yield the number of matched positions, dividing the number of matched positions by the total number of positions in the window of comparison and multiplying the result by 100 to yield the percentage of sequence identity. Those of skill in the art appreciate that there are many established algorithms available to align two sequences. Optimal alignment of sequences for comparison can be conducted, e.g., by the local homology algorithm of Smith and Waterman, 1981, Adv Appl Math. 2:482, by the homology alignment algorithm of Needleman and Wunsch, 1970, J Mol Biol. 48:443, by the search for similarity method of Pearson and Lipman, 1988, Proc Natl Acad Sci USA. 85:2444-8, and particularly by computerized implementations of these algorithms (e.g., BLAST, ALIGN, GAP, BESTFIT, FASTA, and TFASTA; see, e.g., Mount, D. W., Bioinformatics: Sequence and Genome Analysis, 2nd Ed., Cold Spring Harbor Laboratory Press, Cold Spring Harbor, N.Y. (2013))

[0053] Examples of algorithms that are suitable for determining percent sequence identity and sequence similarity are the BLAST and BLAST 2.0, FASTDB, or ALIGN algorithms, which are publically available (e.g., NCBI: National Center for Biotechnology Information). Those skilled in the art can determine appropriate parameters for aligning sequences. For example, the BLASTN program (for nucleotide sequences) can use as defaults a wordlength (W) of 11, an expectation (E) of 10, M=5, N=−4, and a comparison of both strands. Comparison of amino acid sequences using BLASTP can use as defaults a wordlength (W) of 3, an expectation (E) of 10, and the BLOSUM62 scoring matrix (see Henikoff and Henikoff, 1989, Proc Natl Acad Sci USA. 89:10915-9).

[0054] “Amino acid substitution” refers to the replacement of one amino acid in a polypeptide with another amino acid. A “conservative amino acid substitution” refers to the interchangeability of residues having similar side chains, and thus typically involves substitution of the amino acid in the polypeptide with amino acids within the same or similar defined class of amino acids. By way of example and not limitation, an amino acid with an aliphatic side chain may be substituted with another aliphatic amino acid, e.g., alanine, valine, leucine, isoleucine, and methionine; an amino acid with hydroxyl side chain is substituted with another amino acid with a hydroxyl side chain, e.g., serine and threonine; an amino acid having aromatic side chains is substituted with another amino acid having an aromatic side chain, e.g., phenylalanine, tyrosine, tryptophan, and histidine; an amino acid with a basic side chain is substituted with another amino acid with a basic side chain, e.g., lysine, arginine, and histidine; an amino acid with an acidic side chain is substituted with another amino acid with an acidic side chain, e.g., aspartic acid or glutamic acid; and a hydrophobic or hydrophilic amino acid is replaced with another hydrophobic or hydrophilic amino acid, respectively.

[0055] “Amino acid insertion” refers to the incorporation of at least one amino acid into a predetermined amino acid sequence. An insertion can be the insertion of one or two amino acid residues; however, larger insertions of about three to about five, or up to about ten or more amino acid residues are contemplated herein.

[0056] “Amino acid deletion” refers to the removal of one or more amino acid residues from a predetermined amino acid sequence. A deletion can be the removal of one or two amino acid residues; however, larger deletions of about three to about five, or up to about ten or more amino acid residues are contemplated herein.

[0057] “Subject” refers to a mammal, including, but not limited to humans, non-human primates, and non-primates, such as goats, horses, and cows. In some embodiments, the terms “subject” and “patient” are used interchangeably herein in reference to a human subject.

[0058] “Therapeutically effective dose” or “therapeutically effective amount” or “effective dose” refers to that quantity of a compound, including a biologic compound, or pharmaceutical composition that is sufficient to result in a desired activity upon administration to a mammal in need thereof. As used herein, with respect to the pharmaceutical compositions comprising an antibody, the term “therapeutically effective amount/dose” refers to the amount/dose of the antibody or pharmaceutical composition thereof that is sufficient to produce an effective response upon administration to a mammal.

[0059] “Pharmaceutically acceptable” refers to compounds or compositions which are generally safe, non-toxic and neither biologically nor otherwise undesirable, and includes a compound or composition that is acceptable for human pharmaceutical and veterinary use. The compound or composition may be approved or approvable by a regulatory agency or listed in the U.S. Pharmacopeia or other generally recognized pharmacopeia for use in animals, including humans.

[0060] “Pharmaceutically acceptable excipient, carrier or adjuvant” refers to an excipient, carrier or adjuvant that can be administered to a subject, together with at least one therapeutic agent (e.g., an antibody of the present disclosure), and which does not destroy the pharmacological activity thereof and is generally safe, nontoxic and neither biologically nor otherwise undesirable when administered in doses sufficient to deliver a therapeutic amount of the agent.

[0061] The term “treatment” is used interchangeably herein with the term “therapeutic method” and refers to both 1) therapeutic treatments or measures that cure, slow down, lessen symptoms of, and/or halt progression of a diagnosed pathologic conditions, disease or disorder, and 2) and prophylactic/preventative measures. Those in need of treatment may include individuals already having a particular medical disease or disorder as well as those who may ultimately acquire the disorder (i.e., those at risk or needing preventive measures).

[0062] The term “subject” or “patient” as used herein refers to any individual to which the subject methods are performed. Generally, the subject is human, although as will be appreciated by those in the art, the subject may be any animal.

[0063] In some embodiments, compounds of the present invention are able to cross the blood-brain barrier (BBB). The term “blood-brain barrier” or “BBB”, as used herein, refers to the BBB proper as well as to the blood-spinal barrier. The blood-brain barrier, which consists of the endothelium of the brain vessels, the basal membrane and neuroglial cells, acts to limit penetration of substances into the brain. In some embodiments, the brain/plasma ratio of total drug is at least approximately 0.01 after administration (e.g. oral or intravenous administration) to a patient. In some embodiments, the brain/plasma ratio of total drug is at least approximately 0.03. In some embodiments, the brain/plasma ratio of total drug is at least approximately 0.06. In some embodiments, the brain/plasma ratio of total drug is at least approximately 0.1. In some embodiments, the brain/plasma ratio of total drug is at least approximately 0.2.

[0064] The term “homologue,” especially “TREM homologue” as used herein refers to any member of a series of peptides or nucleic acid molecules having a common biological activity, including antigenicity/immunogenicity and inflammation regulatory activity, and/or structural domain and having sufficient amino acid or nucleotide sequence identity as defined herein. TREM homologues can be from either the same or different species of animals.

[0065] The term “variant” as used herein refers either to a naturally occurring allelic variation of a given peptide or a recombinantly prepared variation of a given peptide or protein in which one or more amino acid residues have been modified by amino acid substitution, addition, or deletion.

[0066] The term “derivative” as used herein refers to a variation of given peptide or protein that are otherwise modified, i.e., by covalent attachment of any type of molecule, preferably having bioactivity, to the peptide or protein, including non-naturally occurring amino acids.

### Description of Treatment Methods of the Present Invention

[0067] In one aspect, the present invention provides a method of treating a disease or disorder caused by and/or associated with an ABCD1 dysfunction in a human patient, the method comprising administering to the patient a compound that increases activity of TREM2. In some embodiments, the compound that increases activity of TREM2 is an agonist of TREM2. In some embodiments, the compound that increases activity of TREM2 is a compound that prevents the degradation of TREM2.

[0068] In one aspect, the present invention provides a method of treating a disease or disorder caused by and/or associated with an ABCD1 dysfunction in a human patient, the method comprising administering to the patient an effective amount of an agonist of TREM2. In some embodiments, administration of the agonist of TREM2 activates DAP12 signaling pathways in the patient, resulting in an increase in microglia proliferation, microglia survival and microglia phagocytosis, which in turn results in a slowing of disease progression. In some embodiments, the agonist of TREM2 is an antibody or a small molecule.

[0069] In some embodiments, the agonist of TREM2 activates TREM2/DAP12 signaling in myeloid cells, including monocytes, dendritic cells, microglial cells and macrophages. In some embodiments, an agonist of TREM2 activates, induces, promotes, stimulates, or otherwise increases one or more TREM2 activities. TREM2 activities that are activated or increased by the agonist, include but are not limited to: TREM2 binding to DAP12; DAP12 binding to TREM2; TREM2 phosphorylation, DAP12 phosphorylation; PI3K activation; increased levels of soluble TREM2 (sTREM2); increased levels of soluble CSF1R (sCSF1R); increased expression of one or more anti-inflammatory mediators (e.g., cytokines) selected from the group consisting of IL-12p70, IL-4, IL-6, and IL-10; reduced expression of one or more pro-inflammatory mediators selected from the group consisting of IFN-a4, IFN-b, IL-6, IL-12 p70, IL-12 p40, IL-1β, TNF, TNF-α, IL-10, IL-8, CRP, TGF-beta members of the chemokine protein families, IL-20 family members, IL-33, LIF, IFN-gamma, OSM, CNTF, TGF-beta, GM-CSF, IL-11, IL-12, IL-17, IL-18, and CRP; increased expression of one or more chemokines selected from the group consisting of CCL2, CCL4, CXCL10, CCL3 and CST7; reduced expression of TNF-α, IL-6, or both; extracellular signal-regulated kinase (ERK) phosphorylation; increased expression of C-C chemokine receptor 7 (CCR7); induction of microglial cell chemotaxis toward CCL19 and CCL21 expressing cells; an increase, normalization, or both of the ability of bone marrow-derived dendritic cells to induce antigen-specific T-cell proliferation; induction of osteoclast production, increased rate of osteoclastogenesis, or both; increasing the survival and/or function of one or more of dendritic cells, macrophages, microglial cells, M1 macrophages and/or microglial cells, activated M1 macrophages and/or microglial cells, M2 macrophages and/or microglial cells, monocytes, osteoclasts, Langerhans cells of skin, and Kupffer cells; induction of one or more types of clearance selected from the group consisting of apoptotic neuron clearance, nerve tissue debris clearance, non-nerve tissue debris clearance, bacteria or other foreign body clearance, disease-causing protein clearance, disease-causing peptide clearance, and disease-causing nucleic acid clearance; induction of phagocytosis of one or more of apoptotic neurons, nerve tissue debris, non-nerve tissue debris, bacteria, other foreign bodies, disease-causing proteins, disease-causing peptides, or disease-causing nucleic acids; normalization of disrupted TREM2/DAP12-dependent gene expression; recruitment of Syk, ZAP70, or both to the TREM2/DAP12 complex; Syk phosphorylation; increased expression of CD83 and/or CD86 on dendritic cells, macrophages, monocytes, and/or microglia; reduced secretion of one or more inflammatory cytokines selected from the group consisting of TNF-α, IL-10, IL-6, MCP-1, IFN-α4, IFN-b, IL-1β, IL-8, CRP, TGF-beta members of the chemokine protein families, IL-20 family members, IL-33, LIF, IFN-gamma, OSM, CNTF, TGF-beta, GM-CSF, IL-11, IL-12, IL-17, IL-18, and CRP; reduced expression of one or more inflammatory receptors; increasing phagocytosis by macrophages, dendritic cells, monocytes, and/or microglia under conditions of reduced levels of MCSF; decreasing phagocytosis by macrophages, dendritic cells, monocytes, and/or microglia in the presence of normal levels of MCSF; increasing activity of one or more TREM2-dependent genes; increased levels of one or more of CSF1, CSF2 and IL-34; or any combination thereof. In another aspect, the invention provides a TREM2 agonist for the manufacture of a medicament for the treatment of a disease or disorder caused by and/or associated with an ABCD1 dysfunction.

[0070] In another aspect, the invention provides a TREM2 agonist for use in treating a disease or disorder caused by and/or associated with an ABCD1 dysfunction in a human patient.

[0071] I. Diseases and Disorders

[0072] The methods of the present invention can be used to treat any disease or disorder related to a dysfunction in ABCD1. In some embodiments, the patient is selected for treatment based on a diagnosis that includes the presence of a mutation in an ABCD1 gene affecting the function of ABCD1. In some embodiments, the mutation in the ABCD1 gene is a mutation that causes a decrease in ABCD1 activity or a cessation of ABCD1 activity. In some embodiments, the disease or disorder is caused by a heterozygous ABCD1 mutation. In some embodiments, the disease or disorder is caused by a homozygous ABCD1 mutation. In some embodiments,

[0073] the disease or disorder is caused by a splice mutation in the ABCD1 gene. In some embodiments, the disease or disorder is caused by a missense mutation in the ABCD1 gene.

[0074] In some embodiments, the disease or disorder is a disease or disorder resulting from a change (e.g. increase, decrease or cessation) in the activity of ABCD1. In some embodiments, the disease or disorder is a disease or disorder resulting from a decrease or cessation in the activity of ABCD1. ABCD1 related activities that are changed in the disease or disorder include, but are not limited to peroxisomal import of fatty acids and/or fatty acyl-CoAs and production of adrenoleukodystrophy protein (ALDP).

[0075] In some embodiments, the disease or disorder is caused by a loss-of-function mutation in ABCD1. In some embodiments, the loss-of-function mutation results in a complete cessation of ABCD1 function. In some embodiments, the loss-of-function mutation results in a partial loss of ABCD1 function, or a decrease in ABCD1 activity. In some embodiments, the disease or disorder is caused by a homozygous mutation in ABCD1.

[0076] In some embodiments, the disease or disorder is a neurodegenerative disorder. In some embodiments, the disease or disorder is a neurodegenerative disorder caused by and/or associated with an ABCD1 dysfunction.

[0077] In some embodiments, the disease or disorder is an immunological disorder. In some embodiments, the disease or disorder is an immunological disorder caused by and/or associated with an ABCD1 dysfunction.

[0078] In some embodiments, the disease or disorder is selected from X-linked adrenoleukodystrophy (x-ALD), Globoid cell leukodystrophy (also known as Krabbe disease), Metachromatic leukodystrophy (MLD), Cerebral autosomal dominant arteriopathy with subcortical infarcts and leukoencephalopathy (CADASIL), Alexander disease, fragile X-associated tremor ataxia syndrome (FXTAS), adult-onset autosomal dominant leukodystrophy (ADLD), and X-linked Charcot-Marie-Tooth disease (CMTX).

[0079] In some embodiments, the disease or disorder is selected from X-linked adrenoleukodystrophy (x-ALD), Globoid cell leukodystrophy (also known as Krabbe disease), Metachromatic leukodystrophy (MLD), Cerebral autosomal dominant arteriopathy with subcortical infarcts and leukoencephalopathy (CADASIL), Vanishing white matter disease (VWM), Alexander disease, fragile X-associated tremor ataxia syndrome (FXTAS), adult-onset autosomal dominant leukodystrophy (ADLD), and X-linked Charcot-Marie-Tooth disease (CMTX), wherein any of the aforementioned diseases or disorders are present in a patient exhibiting ABCD1 dysfunction, or having a mutation in a gene affecting the function of ABCD1.

[0080] In some embodiments, the disease or disorder is X-linked adrenoleukodystrophy (x-ALD). In some embodiments, the x-ALD is a cerebral form of X-linked ALD (cALD).

[0081] In some embodiments, the disease or disorder is Addison disease wherein the patient has been found to have a mutation in one or more ABCD1 genes affecting ABCD1 function. In some embodiments, the disease or disorder is Addison disease, wherein the patient has a loss-of-function mutation in ABCD1.

[0082] In some embodiments, the disease or disorder is a white matter disease wherein the patient has been found to have a mutation in one or more ABCD1 genes affecting ABCD1 function. In some embodiments, the disease or disorder is a white matter disease, wherein the patient has a loss-of-function mutation in ABCD1.

[0083] In some embodiments, the disease or disorder is vanishing white matter disease wherein the patient has been found to have a mutation in one or more ABCD1 genes affecting ABCD1 function. In some embodiments, the disease or disorder is vanishing white matter disease, wherein the patient has a loss-of-function mutation in ABCD1.

[0084] In some embodiments, the disease or disorder is selected from Nasu-Hakola disease, Alzheimer's disease, frontotemporal dementia, multiple sclerosis, Guillain-Barre syndrome, amyotrophic lateral sclerosis (ALS), or Parkinson's disease, wherein any of the aforementioned diseases or disorders are present in a patient exhibiting ABCD1 dysfunction, or having a mutation in a gene affecting the function of ABCD1.

[0085] In some embodiments, the disease or disorder is Alzheimer's disease wherein the patient has been found to have a mutation in one or more ABCD1 genes affecting ABCD1 function. In some embodiments, the patient has been diagnosed with Alzheimer's disease based on neuropathology, and also has been found to have a mutation in one or more ABCD1 genes affecting ABCD1 function. In some embodiments, the disease or disorder is Alzheimer's disease, wherein the patient has a loss-of-function mutation in ABCD1.

[0086] In some embodiments, the disease or disorder is Nasu-Hakola disease wherein the patient has been found to have a mutation in one or more ABCD1 genes affecting ABCD1 function. In some embodiments, the patient has been diagnosed with Nasu-Hakola disease based on neuropathology, and also has been found to have a mutation in one or more ABCD1 genes affecting ABCD1 function. In some embodiments, the disease or disorder is Nasu-Hakola disease, wherein the patient has a loss-of-function mutation in ABCD1.

[0087] In some embodiments, the disease or disorder is Parkinson's disease wherein the patient has been found to have a mutation in one or more ABCD1 genes affecting ABCD1 function. In some embodiments, the patient has been diagnosed with Parkinson's disease based on neuropathology, and also has been found to have a mutation in one or more ABCD1 genes affecting ABCD1 function. In some embodiments, the disease or disorder is Parkinson's disease, wherein the patient has a loss-of-function mutation in ABCD1.

[0088] In some embodiments, the disease or disorder is multiple sclerosis wherein the patient has been found to have a mutation in one or more ABCD1 genes affecting ABCD1 function. In some embodiments, the patient has been diagnosed with multiple sclerosis based on neuropathology, and also has been found to have a mutation in one or more ABCD1 genes affecting ABCD1 function. In some embodiments, the disease or disorder is multiple sclerosis, wherein the patient has a loss-of-function mutation in ABCD1.

[0089] In some embodiments, the disease or disorder is ALS wherein the patient has been found to have a mutation in one or more ABCD1 genes affecting ABCD1 function. In some embodiments, the patient has been diagnosed with ALS based on neuropathology, and also has been found to have a mutation in one or more ABCD1 genes affecting ABCD1 function. In some embodiments, the disease or disorder is ALS, wherein the patient has a loss-of-function mutation in ABCD1.

[0090] In some embodiments, the disease or disorder is Guillain-Barre syndrome wherein the patient has been found to have a mutation in one or more ABCD1 genes affecting ABCD1 function. In some embodiments, the patient has been diagnosed with Guillain-Barre syndrome based on neuropathology, and also has been found to have a mutation in one or more ABCD1 genes affecting ABCD1 function. In some embodiments, the disease or disorder is Guillain-Barre syndrome, wherein the patient has a loss-of-function mutation in ABCD1.

[0091] In some embodiments, the patient also possesses a mutation in one or more of NOTCH3, HTRA1, TREX1, ARSA, EIF2B1, EIF2B2, EIF2B3, EIF2B4, and EIF2B5.

[0092] In some embodiments, the disease or disorder presents one or more symptoms selected from abnormal motor control, parkinsonism, slow movement (bradykinesia), involuntary trembling (tremor), muscle stiffness (rigidity), cognitive decline, dementia, inability to speak, inability to walk, memory loss, personality changes, seizures, depression, loss of executive function, loss of impulse control, loss of attention span, adrenal insufficiency, vision impairment, hearing impairment, sexual dysfunction, impaired adrenocortical function, attention-deficit, hyperactivity, and incontinence.

[0093] In one aspect, the present invention provides a method of treating x-ALD in a human patient, the method comprising administering to the patient a compound that increases activity of TREM2. In some embodiments, the compound that increases activity of TREM2 is an agonist of TREM2. In some embodiments, the compound that increases activity of TREM2 is a compound that prevents the degradation of TREM2.

[0094] In one aspect, the present invention provides a method of treating x-ALD in a human patient, the method comprising administering to the patient an effective amount of an agonist of TREM2. In some embodiments, administration of the agonist of TREM2 activates DAP12 signaling pathways in the patient, resulting in an increase in microglia proliferation, microglia survival and microglia phagocytosis, which in turn results in a slowing of disease progression in x-ALD. In some embodiments, the agonist of TREM2 is an antibody or a small molecule.

[0095] In another aspect, the invention provides a TREM2 agonist for the manufacture of a medicament for the treatment of a disease or disorder related to an ABCD1 dysfunction. In another aspect, the invention provides a TREM2 agonist for the manufacture of a medicament for the treatment of x-ALD.

[0096] In another aspect, the invention provides a TREM2 agonist for use in treating a disease or disorder related to an ABCD1 dysfunction in a human patient. In another aspect, the invention provides a TREM2 agonist for use in treating x-ALD in a human patient.

[0097] Huntington's Disease

[0098] In one aspect, the present invention provides a method of treating Huntington's disease in a human patient, the method comprising administering to the patient an effective amount of an agonist of TREM2. In some embodiments, administration of the agonist of TREM2 activates DAP12 signaling pathways in the patient, resulting in an increase in microglia proliferation, microglia survival and microglia phagocytosis, which in turn results in a slowing of disease progression in Huntington's disease. In some embodiments, the agonist of TREM2 is an antibody or a small molecule. In some embodiments, the agonist of TREM2 is an antibody or a small molecule disclosed elsewhere herein. In some embodiments, the agonist of TREM2 is an antibody disclosed elsewhere herein. In some embodiments, the agonist of TREM2 is a small molecule disclosed elsewhere herein. In another aspect, the invention provides a TREM2 agonist for the manufacture of a medicament for the treatment of Huntington's disease. In another aspect, the invention provides a TREM2 agonist for use in treating Huntington's disease in a human patient.

### II. Antibodies

[0099] In one aspect, the present invention provides a method of treating ALSP in a human patient, the method comprising administering to the patient an effective amount of an antigen binding protein or an antibody, or an antigen-binding fragment thereof, which increases the activity of TREM2. In some embodiments, the antibody is an agonist of TREM2. In some embodiments, the antibody is an agonist of TREM2 that specifically binds to and activates human TREM2.

[0100] The TREM2 agonist antibodies specifically bind to human TREM2 (SEQ ID NO: 1) or an extra cellular domain (ECD) of human TREM2 (e.g. ECD set forth in SEQ ID NO: 2), for example with an equilibrium dissociation constant (K_{D}) less than 50 nM, less than 25 nM, less than 10 nM, or less than 5 nM. In some embodiments, the TREM2 agonist antibodies do not cross-react with other TREM proteins, such as human TREM1. In some embodiments, the TREM2 agonist antibodies do not bind to human TREM1 (SEQ ID NO: 4).

[0101] In some embodiments, the TREM2 antibody specifically bind to human TREM2 human TREM2 residues 19-174. In some embodiments, the TREM2 antibody specifically bind to IgV region of human TREM2, for example human TREM2 residues 19-140.

[0102] In certain embodiments, anti-TREM2 antibodies of the present disclosure bind to one or more amino acids within amino acid residues 29-112 of human TREM 2 (SEQ ID NO: 1), or within amino acid residues on a TREM2 protein corresponding to amino acid residues 29-112 of SEQ ID NO: 1. In some embodiments, anti-TREM2 antibodies of the present disclosure bind to one or more amino acids within amino acid residues 29-41 of human TREM 2 (SEQ ID NO: 1), or within amino acid residues on a TREM2 protein corresponding to amino acid residues 29-41 of SEQ ID NO: 1. In some embodiments, anti-TREM2 antibodies of the present disclosure bind to one or more amino acids within amino acid residues 47-69 of human TREM 2 (SEQ ID NO: 1), or within amino acid residues on a TREM2 protein corresponding to amino acid residues 47-69 of SEQ ID NO: 1. In some embodiments, anti-TREM2 antibodies of the present disclosure bind to one or more amino acids within amino acid residues 76-86 of human TREM 2 (SEQ ID NO: 1), or within amino acid residues on a TREM2 protein corresponding to amino acid residues 76-86 of SEQ ID NO: 1. In some embodiments, anti-TREM2 antibodies of the present disclosure bind to one or more amino acids within amino acid residues 91-100 of human TREM2 (SEQ ID NO: 1), or within amino acid residues on a TREM2 protein corresponding to amino acid residues 91-100 of SEQ ID NO: 1. In some embodiments, anti-TREM2 antibodies of the present disclosure bind to one or more amino acids within amino acid residues 99-115 of human TREM 2 (SEQ ID NO: 1), or within amino acid residues on a TREM2 protein corresponding to amino acid residues 99-115 of SEQ ID NO: 1. In some embodiments, anti-TREM2 antibodies of the present disclosure bind to one or more amino acids within amino acid residues 104-112 of human TREM 2 (SEQ ID NO: 1), or within amino acid residues on a TREM2 protein corresponding to amino acid residues 104-112 of SEQ ID NO: 1. In some embodiments, anti-TREM2 antibodies of the present disclosure bind to one or more amino acids within amino acid residues 114-118 of human TREM 2 (SEQ ID NO: 1), or within amino acid residues on a TREM2 protein corresponding to amino acid residues 114-118 of SEQ ID NO: 1. In some embodiments, anti-TREM2 antibodies of the present disclosure bind to one or more amino acids within amino acid residues 130-171 of human TREM 2 (SEQ ID NO: 1), or within amino acid residues on a TREM2 protein corresponding to amino acid residues 130-171 of SEQ ID NO: 1. In some embodiments, anti-TREM2 antibodies of the present disclosure bind to one or more amino acids within amino acid residues 139-153 of human TREM 2 (SEQ ID NO: 1), or within amino acid residues on a TREM2 protein corresponding to amino acid residues 139-153 of SEQ ID NO: 1. In some embodiments, anti-TREM2 antibodies of the present disclosure bind to one or more amino acids within amino acid residues 139-146 of human TREM 2 (SEQ ID NO: 1), or within amino acid residues on a TREM2 protein corresponding to amino acid residues 139-146 of SEQ ID NO: 1. In some embodiments, anti-TREM2 antibodies of the present disclosure bind to one or more amino acids within amino acid residues 130-144 of human TREM 2 (SEQ ID NO: 1), or within amino acid residues on a TREM2 protein corresponding to amino acid residues 130-144 of SEQ ID NO: 1. In some embodiments, anti-TREM2 antibodies of the present disclosure bind to one or more amino acids within amino acid residues 158-171 of human TREM 2 (SEQ ID NO: 1), or within amino acid residues on a TREM2 protein corresponding to amino acid residues 158-171 of SEQ ID NO: 1.

[0103] In some embodiments, anti-TREM2 antibodies of the present disclosure bind to one or more amino acids within amino acid residues 43-50 of human TREM 2 (SEQ ID NO: 1), or within amino acid residues on a TREM2 protein corresponding to amino acid residues 43-50 of SEQ ID NO: 1. In some embodiments, anti-TREM2 antibodies of the present disclosure bind to one or more amino acids within amino acid residues 49-57 of human TREM 2 (SEQ ID NO: 1), or within amino acid residues on a TREM2 protein corresponding to amino acid residues 49-57 of SEQ ID NO: 1. In some embodiments, anti-TREM2 antibodies of the present disclosure bind to one or more amino acids within amino acid residues 139-146 of human TREM 2 (SEQ ID NO: 1), or within amino acid residues on a TREM2 protein corresponding to amino acid residues 139-146 of SEQ ID NO: 1. In some embodiments, anti-TREM2 antibodies of the present disclosure bind to one or more amino acids within amino acid residues 140-153 of human TREM 2 (SEQ ID NO: 1), or within amino acid residues on a TREM2 protein corresponding to amino acid residues 140-153 of SEQ ID NO: 1. In some embodiments, the TREM2 antibody specifically binds to the stalk region of human TREM2, for example amino acid residues 145-174 of human TREM2.

[0104] In some embodiments, the antibody, or an antigen-binding fragment thereof, specifically binds TREM2 and prevents the degradation or cleavage of TREM2.

[0105] In some embodiments, the antibody is a polyclonal antibody. In some embodiments, the antibody is a monoclonal antibody. In some embodiments, the antibody is a chimeric antibody. In some embodiments, the antibody is a humanized antibody. In some embodiments, the antibody is a human antibody, particularly a fully human antibody. In some embodiments, the antibody is a bispecific or other multivalent antibody. In some embodiments, the antibody is a single chain antibody.

[0106] In some embodiments, a TREM2 activating antibody comprise a light chain variable region comprising complementarity determining regions CDRL1, CDRL2, and CDRL3 and a heavy chain variable region comprising complementarity determining regions CDRH1, CDRH2, and CDRH3 described herein.

[0107] In certain embodiments, the TREM2 agonist antigen binding proteins of the invention comprise at least one light chain variable region comprising a CDRL1, CDRL2, and CDRL3, and at least one heavy chain variable region comprising a CDRH1, CDRH2, and CDRH3 from an anti-TREM2 agonist antibody described herein.

[0108] In some embodiments, a TREM2 activating antibody comprise a light chain variable region and a heavy chain variable region described herein. The light chain and heavy chain variable regions or CDRs may be from any of the anti-TREM2 antibodies or a variant thereof described herein.

[0109] Sequence Information

[0110] A. PCT Patent Application Publication No. WO2018/195506A1

[0111] In some embodiments, the TREM2 agonist is an antigen binding protein or an antibody, or an antigen-binding fragment thereof, as described in PCT Patent Application Publication No. WO2018/195506A1, which is incorporated by reference herein, in its entirety.

[0112] In some embodiments, the TREM2 agonist antigen binding protein comprises a CDRL1 or a variant thereof having one, two, three or four amino acid substitutions; a CDRL2, or a variant thereof having one, two, three or four amino acid substitutions; a CDRL3, or a variant thereof having one, two, three or four amino acid substitutions; a CDRH1, or a variant thereof having one, two, three or four amino acid substitutions; a CDRH2, or a variant thereof having one, two, three or four amino acid substitutions; and a CDRH3, or a variant thereof having one, two, three or four amino acid substitutions, where the amino acid sequences of the CDRL1, CDRL2, CDRL3, CDRH1, CDRH2, and CDRH3 are provided in TABLES A1 and A2 below, along with exemplary light chain and variable regions.

TABLE A1
Exemplary Anti-Human TREM2 Antibody Light Chain Variable Region Amino Acid Sequences

| Ab ID. | VL Group | VL Amino Acid Sequence | CDRL1 | CDRL2 | CDRL3 |
|---|---|---|---|---|---|
| 12G10 | LV-01 | QAVPTQPSSLSASPGVLASLTCTLRSGINVG | TLRSGI | YKSDSD | MIWYSS |
| | | TYRIYWYQQKPGSPPQYLLRYKSDSDKQQ | NVGTY | KQQGS | AVV |
| | | GSGVPSRFSGSKDASANAGILLISGLQSEDE | RIY | (SEQ ID | (SEQ ID |
| | | ADYYCMIWYSSAVVFGGGTKLTVL | (SEQ ID | NO:19) | NO:31) |
| | | (SEQ ID NO:46) | NO:5) | | |
| 26A10 | LV-02 | SYELTQPPSVSVSPGQTASITCSGDKLGDKY | SGDKL | QDSKRP | QAWDS |
| | | VCWYQQKPGQSPVLVIYQDSKRPSGIPERF | GDKYVC | S | NTVV |
| | | SGSNSGNTATLTISGTQAMDEADYYCQAW | (SEQ ID | (SEQ ID | (SEQ ID |
| | | DSNTVVFGGGTKLTVL (SEQ ID NO:47) | NO:6) | NO:20) | NO:32) |
| 26C10 | LV-03 | SFELTQPPSVSVSPGQTASITCSGDKLGDKY | SGDKL | QDTKRP | QAWDSS |
| | | VCWYQQKPGQSPMLVIYQDTKRPSGIPERF | GDKYVC | S | TVV |
| | | SGSNSGNTATLTISGTQAMDEADYYCQAW | (SEQ ID | (SEQ ID | (SEQ ID |
| | | DSSTVVFGGGTKLTVL (SEQ ID NO:48) | NO:6) | NO:21) | NO:33) |
| 26F2 | LV-04 | SYELTQPPSVSVSPGQTASITCSGDKLGDKY | SGDKL | QDSKRP | QAWDSS |
| | | VCWYQQKPGQSPVLVIFQDSKRPSGIPERFS | GDKYVC | S | TVV |
| | | GSNSGNTATLTISGTQAMDEADYYCQAWD | (SEQ ID | (SEQ ID | (SEQ ID |
| | | SSTVVFGGGTKLTVL (SEQ ID NO:49) | NO:6) | NO:20) | NO:33) |
| 33B12 | LV-05 | SYELTQPPSVSVSPGQTASITCSGDKLGDKY | SGDKL | QDSKRP | QAWDSS |
| | | VCWYQQKPGQSPVLVIYQDSKRPSGIPERF | GDKYVC | S | TVV |
| | | SGSNSGNTATLTISGTQAMDEADYYCQAW | (SEQ ID | (SEQ ID | (SEQ ID |
| | | DSSTVVFGGGTKLTVL (SEQ ID NO:50) | NO:6) | NO:20) | NO:33) |
| 24C12 | LV-06 | GIVMTQSPDSLAVSLGERATINCKSSRSVLY | KSSRSV | WASTRE | QQYYIT |
| | | SSNNKNYLAWYQQKPGQPPKVLIYWASTR | LYSSN | S | PIT |
| | | ESGVPDRFSGSGSGTDFTLTISSLQAEDVAV | KNYLA | (SEQ ID | (SEQ ID |
| | | YNCQQYYITPITFGQGTRLEIK | (SEQ ID | NO:22) | NO:34) |
| | | (SEQ ID NO:51) | NO:7) | | |
| 24G6 | LV-07 | DIVMTQSPDSLAVSLGERATINCKSSQSVLY | KSSQSV | WASTRE | QQYYST |
| | | SSNNKHFLAWYQQKPGQPPKLLIYWASTR | LYSSN | S | PLT |
| | | ESGVPDRFSGSGSGTDFTLTISSLQAEDVAF | KFIFLA | (SEQ ID | (SEQ ID |
| | | YYCQQYYSTPLTFGGGTKVEIK | (SEQ ID | NO:22) | NO:35) |
| | | (SEQ ID NO:52) | NO:8) | | |
| 24A10 | LV-08 | DIVMTQSPDSLAVSLGERATITCKSSHNVL | KSSHN | WASTRE | HQYYST |
| | | YSSNNKNYLAWYQQKPGQPPKLLIYWAST | VLYSSN | S | PCS |
| | | RESGVPDRFSGSGSGTDFTLTISSLQAEDVA | NKNYLA | (SEQ ID | (SEQ ID |
| | | VYYCHQYYSTPCSFGQGTKLEIK | (SEQ ID | NO:22) | NO:36) |
| | | (SEQ ID NO:53) | NO:9) | | |
| 10E3 | LV-09 | EIVMTQSPATLSVSPGERATLSCRASQSVSS | RASQS | GASTRA | LQDNN |
| | | NLAWFQQKPGQAPRLLIYGASTRATGIPAR | VSSNLA | T | WPPT |
| | | FSVSGSGTEFTLTISSLQSEDFAFYYCLQDN | (SEQ ID | (SEQ ID | (SEQ ID |
| | | NWPPTFGPGTKVDIK (SEQ ID NO:54) | NO:10) | NO:23) | NO:37) |
| 13E7 | LV-10 | EIVMTQSPATLSVSPGERATLSCRASQSVSS | RASQS | GASTRA | LQDNN |
| 14C12 | | NLAWFQQKPGQAPRLLIYGASTRATGIPAR | VSSNLA | T | WPPT |
| | | FSVSGSGTEFTLTISSLQSEDFAVYYCLQDN | (SEQ ID | (SEQ ID | (SEQ ID |
| | | NWPPTFGPGTKVDIK (SEQ ID NO:55) | NO:10) | NO:23) | NO:37) |
| 25F12 | LV-11 | EKVMTQSPATLSVSPGERATLSCRASQSVN | RASQS | GASTRA | QQYNN |
| | | NNLAWYQQKPGQAPRLLIYGASTRATGIPA | VNNNL | T | WPRT |
| | | RFSGSGSGTEFTLTISSLQSEDFAVYYCQQY | A | (SEQ ID | (SEQ ID |
| | | NNWPRTFGQGTKVEIK (SEQ ID NO:56) | (SEQ ID | NO:23) | NO:38) |
| | | | NO:11) | | |
| 32E3 | LV-12 | EFVLTQSPGTLSLSPGERATLSCRASQIISSN | RASQIIS | SASSRA | QQFDSS |
| | | YLAWYQQKPGQAPRLLIYSASSRATGIPDR | SNYLA | T | PIT |
| | | FSGSGSGTDFTLTISRLEPEDFAVYYCQQFD | (SEQ ID | (SEQ ID | (SEQ ID |
| | | SSPITFGRGTRLDIK (SEQ ID NO:57) | NO:12) | NO:24) | NO:39) |
| 24F4 | LV-13 | EIVLTQSPGTLSLSPGERATLSCRASQSVSSS | RASQS | GASSRA | QQYDTS |
| | | YLAWYQQKPGQAPRLLIYGASSRATGIPDR | VSSSYLA | T | PFT |
| | | FSGSGSGTDFTLTISRLEPEDFALYYCQQYD | (SEQ ID | (SEQ ID | (SEQ ID |
| | | TSPFTFGPGTKVDIK (SEQ ID NO:58) | NO:13) | NO:25) | NO:40) |
| 16B8 | LV 14 | DIQMTQSPSSVSASVGDRVTVTCRASQDIN | RASQDI | AASSLQ | QQSNSF |
| | | SWLAWYQQKPGKAPKLLIYAASSLQTGVP | NSWLA | T | PIT |
| | | SRFSGSGSGTDFTLTISSLQPEDFATYSCQQS | (SEQ ID | (SEQ ID | (SEQ ID |
| | | NSFPITFGQGTRLEIK (SEQ ID NO:59) | NO:14) | NO:26) | NO:41) |
| 4C5 | LV-15 | DIQMTQSPSSVSASVGDRVTITCRASQGISN | RASQGI | AASSLQ | QQADSF |
| | | WLAWYQQKPGKAPKLLIYAASSLQVGVPL | SNWLA | V | PRN |
| | | RFSGSGSGTDFTLTISSLQPEDFATYYCQQA | (SEQ ID | (SEQ ID | (SEQ ID |
| | | DSFPRNFGQGTKLEIK (SEQ ID NO:60) | NO:15) | NO:27) | NO:42) |
| 6E7 | LV-16 | DIQMTQSPSSVSASVGDRVTITCRASQGISS | RASQGI | AASSLQ | QQADSF |
| | | WLAWYQQKPGKAPKLLIYAASSLQNGVPS | SSWLA | N | PRT |
| | | RFSGSGSGTDFTLTISSLQPEDFATYFCQQA | (SEQ ID | (SEQ ID | (SEQ ID |
| | | DSFPRTFGQGTKLEIK (SEQ ID NO:61) | NO:16) | NO:28) | NO:43) |
| 5E3 | LV-17 | DIQMTQSPSSLSASVGDRVTITCRASQGISN | RASQGI | AASSLQ | QQYSTY |
| | | YLAWFQQKPGKAPKSLIYAASSLQSGVPSK | SNYLA | S | PFT |
| | | FSGSGSGTDFTLTISSLQPEDFATYYCQQYS | (SEQ ID | (SEQ ID | (SEQ ID |
| | | TYPFTFGPGTKVDIK (SEQ ID NO:62) | NO:17) | NO:29) | NO:44) |
| 4G10 | LV-18 | DIQMTQSPSSLSASVGDRVTITCRASQGIRN | RASQGI | AASSLPS | LQHNSY |
| | | DLGWYQQKPGNAPKRLIYAASSLPSGVPSR | RNDLG | (SEQ ID | PWT |
| | | FSGSGSGPEFTLTISSLQPEDFATYYCLQHN | (SEQ ID | NO:30) | (SEQ ID |
| | | SYPWTFGQGTKVEIT (SEQ ID NO:63) | NO:18) | | NO:45) |

TABLE A2
Exemplary Anti-Human TREM2 Antibody Heavy Chain Variable Region Amino Acid Sequences

| Ab ID. | VH Group | VH Amino Acid Sequence | CDRH1 | CDRH2 | CDRH3 |
|---|---|---|---|---|---|
| 12G10 | HV-01 | EVQLLESGGGLVQPGGSLRLSCAASGFTFS | SYAMS | AIGGGG | FYIAVA |
| 24C12 | | SYAMSWVRQAPGKGLEWVSAIGGGGVST | (SEQ ID | VSTYCA | GSHFDY |
| | | YCADSVKGRFTISRDNSKNTLYLQMNSLRA | NO:77) | DSVKG | (SEQ ID |
| | | EDTAVYYCAKFYIAVAGSHFDYWGQGTLV | | (SEQ ID | NO:95) |
| | | TVSS (SEQ ID NO:110) | | NO:87) | |
| 26A10 | HV-02 | EVQLVESGGALVQRGGSLRLSCAASRFTFS | SFGMS | YISSSSF | EGGLTM |
| | | SFGMSWVRQAPGKGLEWVSYISSSSFTIYY | (SEQ ID | TIYYAD | VRGVSS |
| | | ADSVKGRFTISRDNAKNSFYLQMNSLRDED | NO:78) | SVKG | YGLDV |
| | | TAVYYCAREGGLTMVRGVSSYGLDVWGQ | | (SEQ ID | (SEQ ID |
| | | GTTVTVSS (SEQ ID NO:111) | | NO:88) | NO:96) |
| 26C10 | HV-03 | EVQLVESGGALVQPGGSLRLSCAASGFTFS | SFGMS | YISSSSF | EGGITM |
| | | SFGMSWVRQAPGKGLEWVSYISSSSFTIYY | (SEQ ID | TIYYAD | VRGVSS |
| | | ADSVKGRFTISRDNAKNSFYLQMNSLRDED | NO:78) | SVKG | YGMDV |
| | | TAVYFCVREGGITMVRGVSSYGMDVWGQ | | (SEQ ID | (SEQ ID |
| | | GTTVTVSS (SEQ ID NO:112) | | NO:88) | NO:97) |
| 26F2 | HV-04 | EVQLVESGGALVQPGGSLRLSCAASGFTFS | SFGMS | YISSSSF | EGGITM |
| | | SFGMSWVRQAPGKGLEWISYISSSSFTIYYA | (SEQ ID | TIYYAD | VRGVSS |
| | | DSVKGRFTISRDNAKNSFYLQMNSLRDEDT | NO:78) | SVKG | YGMDV |
| | | AVYFCAREGGITMVRGVSSYGMDVWGQG | | (SEQ ID | (SEQ ID |
| | | TTVTVSS (SEQ ID NO:113) | | NO:88) | NO:97) |
| 33B12 | HV-05 | EVQLVESGGALVQPGGSLRLSCAASGFTFS | SFGMS | YISKSSF | EGGLTM |
| | | SFGMSWVRQAPGKGLEWVSYISKSSFTIYY | (SEQ ID | TIYYAD | VRGVSS |
| | | ADSVKGRFTISRDNAKNSFYLQMNSLRDED | NO:78) | SVKG | YGLDV |
| | | TAVYYCAREGGLTMVRGVSSYGLDVWGQ | | (SEQ ID | (SEQ ID |
| | | GTTVTVSS (SEQ ID NO:114) | | NO:89) | NO:96) |
| 24G6 | HV-06 | EVQLLESGGGLVQPGGSLRLSCAASGFTFS | SYAMS | AISGSGG | AYTPMA |
| | | SYAMSWVRQAPGKGLEWVSAISGSGGSTY | (SEQ ID | STYYAD | FFDY |
| | | YADSVKGRFTISRDNSKNTLYLQMNSLRAE | NO:77) | SVKG | (SEQ ID |
| | | DTAVYYCAKAYTPMAFFDYWGQGTLVTV | | (SEQ ID | NO:98) |
| | | SS (SEQ ID NO:115) | | NO: 90) | |
| 24A10 | HV-07 | EVQVLESGGGLVQPGGSLRLSCAASGFTFS | NYAMS | AISGSGG | GGWELF |
| | | NYAMSWVRQAPGKGLEWVSAISGSGGSTY | (SEQ ID | STYYAD | Y |
| | | YADSVKGRFTISRDNSKNTLYLQMNSLRAE | NO:79) | SVKG | (SEQ ID |
| | | DTAVYYCAKGGWELFYWGQGTLVTVSS | | (SEQ ID | NO:99) |
| | | (SEQ ID NO:116) | | NO: 90) | |
| 10E3 | HV-08 | EVQLVQSGAEVKKPGESLMISCKGSGYSFT | NYWIG | ITYPGDS | RRQGIW |
| | | NYWIGWVRQMPGKGLEWMGITYPGDSDTR | (SEQ ID | DTRYSP | GDALDI |
| | | YSPSFQGQVTISADKSISTAYLQWSSLKASD | NO:80) | SFQG | (SEQ ID |
| | | TAMYFCARRRQGIWGDALDIWGQGTLVTV | | (SEQ ID | NO:100) |
| | | SS (SEQ ID NO:117) | | NO:91) | |
| 13E7 | HV-09 | EVQLVQSGAEVKKPGESLMISCKGSGYSFT | SWIG | ITYPGDS | RRQGIW |
| 14C12 | | SYWIGWVRQMPGKGLEWMGITYPGDSDTR | (SEQ ID | DTRYSP | GDALDF |
| | | YSPSFQGQVTISADKSISTAYLQWSSLKASD | NO:81) | SFQG | (SEQ ID |
| | | TAMYFCARRRQGIWGDALDFWGQGTLVT | | (SEQ ID | NO:101) |
| | | VSS (SEQ ID NO:118) | | NO:91) | |
| 25F12 | HV-10 | QVQLQQWGAGLLKPSETLSLTCAVYGGSF | SYYWS | EINHSG | EGYYDI |
| | | SSYYWSWIRQPPGKGLEWIGEINHSGNTNY | (SEQ ID | NTNYNP | LTGYHD |
| | | NPSLKSRVTISVDTSKNQFSLKLSSVTAADT | NO:82) | SLKS | AFDI |
| | | AVYYCAREGYYDILTGYHDAFDIWDQGTM | | (SEQ ID | (SEQ ID |
| | | VTVFS (SEQ ID NO:119) | | NO:92) | NO:102) |
| 32E3 | HV-11 | EVQLVQSGAEVKKPGESLKISCKGSGYSFT | SWIG | IIYPGDS | HDIIPAA |
| | | SYWIGWVRQMPGKGLEWMGITYPGDSDTR | (SEQ ID | DTRYSP | PGAFDI |
| | | YSPSFQGQVTISADKSISTAYLQWSTLKASD | NO: 81) | SFQG | (SEQ ID |
| | | TAIYYCARHDIIPAAPGAFDIWGQGTMVTV | | (SEQ ID | NO:103) |
| | | SS (SEQ ID NO:120) | | NO:91) | |
| 24F4 | HV-12 | EVQLVQSGAEVKKPGESLKISCKGSGYTFT | SWIG | IIYPGDS | QAIAVT |
| | | SYWIGWVRQMPGKGLEWMGITYPGDSDTR | (SEQ ID | DTRYSP | GLGGFD |
| | | YSPSFQGQVTISVDKSSSTAYLQWSSLKAS | NO:81) | SFQG | P |
| | | DTAIYYCTRQAIAVTGLGGFDPWGQGTLV | | (SEQ ID | (SEQ ID |
| | | TVSS (SEQ ID NO:121) | | NO:91) | NO:104) |
| 16B8 | HV-13 | QVQLVQSGAEVKKPGASVKVSCKASGYTF | NYGIS | WISAYN | RGYSYG |
| | | TNYGISWVRQAPGQGLEWMGWISAYNGN | (SEQ ID | GNTNYA | SFDY |
| | | TNYAQKLQGRVTMTTDTSTSTVYMELRSL | NO:83) | QKLQG | (SEQ ID |
| | | RSDDTAVYYCARRGYSYGSFDYWGQGTL | | (SEQ ID | NO:105) |
| | | VTVSS (SEQ ID NO:122) | | NO:93) | |
| 4C5 | HV-14 | EVQLVQSGAEVKKPGESLKISCKGSGHSFT | NYWIA | IIYPGDS | QRTFYY |
| | | NYWIAWVRQMPGKGLEWMGITYPGDSDTR | (SEQ ID | DTRYSP | DSSGYF |
| | | YSPSFQGQVTISADKSISTAYLQWSSLKASD | NO:84) | SFQG | DY |
| | | TAVYFCARQRTFYYDSSGYFDYWGQGTLV | | (SEQ ID | (SEQ ID |
| | | TVSS (SEQ ID NO:123) | | NO:91) | NO:106) |
| 6E7 | HV-15 | EVQLVQSGAEVKKPGESLKISCKGSGYSFT | SYWIA | ITYPGDS | QRTFYY |
| | | SYWIAWVRQMPGKGLEWMGITYPGDSDTR | (SEQ ID | DTRYSP | DSSDYF |
| | | YSPSFQGQVTISADKSISTAYLQWSSLKASD | NO:85) | SFQG | DY |
| | | TAMYFCARQRTFYYDSSDYFDYWGQGTL | | (SEQ ID | (SEQ ID |
| | | VTVSS (SEQ ID NO:124) | | NO:91) | NO:107) |
| 5E3 | HV-16 | QVQLVQSGAEVKKPGASVKVSCKASGYTF | GYYIH | WINPYS | DGGYLA |
| | | TGYYIHWVRQAPGLGLEWMGWINPYSGG | (SEQ ID | GGTTSA | LYGTDV |
| | | TTSAQKFQGRVTMTRDTSISSAYMELSRLR | NO:86) | QKFQG | (SEQ ID |
| | | SDDTAVYYCARDGGYLALYGTDVWGQGT | | (SEQ ID | NO:108) |
| | | TVTVSS (SEQ ID NO:125) | | NO:94) | |
| 4G10 | HV-17 | EVQLVQSGAEVKKPGESLKISCKGSGYSFP | SYWIA | ITYPGDS | QGIEVT |
| | | SYWIAWVRQMPGKGLEWMGITYPGDSDTR | (SEQ ID | DTRYSP | GTGGLD |
| | | YSPSFQGQVTISADKSISTAFLKWSSLKASD | NO:85) | SFQG | V |
| | | TAMYFCARQGIEVTGTGGLDVWGQGTTVT | | (SEQ ID | (SEQ ID |
| | | VSS (SEQ ID NO:126) | | NO:91) | NO:109) |

[0113] As noted above, a TREM2 agonist antigen binding protein may comprise one or more of the CDRs presented in TABLE A1 (light chain CDRs; i.e. CDRLs) and TABLE A2 (heavy chain CDRs, i.e. CDRHs).

[0114] In some embodiments, the TREM2 agonist antigen binding protein comprises one or more light chain CDRs selected from (i) a CDRL1 selected from SEQ ID NOS:5 to 18, (ii) a CDRL2 selected from SEQ ID NOS:19 to 30, and (iii) a CDRL3 selected from SEQ ID NOS:31 to 45, and (iv) a CDRL of (i), (ii) and (iii) that contains one or more, e.g., one, two, three, four or more amino acid substitutions (e.g., conservative amino acid substitutions), deletions or insertions of no more than five, four, three, two, or one amino acids. In these and other embodiments, the TREM2 agonist antigen binding proteins comprise one or more heavy chain CDRS selected from (i) a CDRH1 selected from SEQ ID NOS:77 to 86, (ii) a CDRH2 selected from SEQ ID NOS:87 to 94, and (iii) a CDRH3 selected from SEQ ID NOS:95 to 109, and (iv) a CDRH of (i), (ii) and (iii) that contains one or more, e.g., one, two, three, four or more amino acid substitutions (e.g., conservative amino acid substitutions), deletions or insertions of no more than five, four, three, two, or one amino acids amino acids.

[0115] In some embodiments, the TREM2 agonist antigen binding protein may comprise 1, 2, 3, 4, 5, or 6 variant forms of the CDRs listed in TABLES A1 and A2, each having at least 80%, 85%, 90% or 95% sequence identity to a CDR sequence listed in TABLES A1 and A2. In some embodiments, the TREM2 agonist antigen binding protein includes 1, 2, 3, 4, 5, or 6 of the CDRS listed in TABLES A1 and A2, each differing by no more than 1, 2, 3, 4 or 5 amino acids from the CDRs listed in these tables.

[0116] In some embodiments, the TREM2 agonist antigen binding protein comprises a CDRL1 comprising a sequence selected from SEQ ID NOS:5-18 or a variant thereof having one, two, three or four amino acid substitutions; a CDRL2 comprising a sequence selected from SEQ ID NOS:19-30 or a variant thereof having one, two, three or four amino acid substitutions; a CDRL3 comprising a sequence selected from SEQ ID NOS:31-45 or a variant thereof having one, two, three or four amino acid substitutions; a CDRH1 comprising a sequence selected from SEQ ID NOS:77-86 or a variant thereof having one, two, three or four amino acid substitutions; a CDRH2 comprising a sequence selected from SEQ ID NOS:87-94 or a variant thereof having one, two, three or four amino acid substitutions; and a CDRH3 comprising a sequence selected from SEQ ID NOS:95-109 or a variant thereof having one, two, three or four amino acid substitutions.

[0117] In some embodiments, the TREM2 agonist antigen binding proteins of the invention comprise a CDRL1 comprising a sequence selected from SEQ ID NOS:5-18; a CDRL2 comprising a sequence selected from SEQ ID NOS:19-30; a CDRL3 comprising a sequence selected from SEQ ID NOS:31-45; a CDRH1 comprising a sequence selected from SEQ ID NOS:77-86; a CDRH2 comprising a sequence selected from SEQ ID NOS:87-94; and a CDRH3 comprising a sequence selected from SEQ ID NOS:95-109.

[0118] In some embodiments, the TREM2 agonist antigen binding protein comprise a light chain variable region comprising a CDRL1, a CDRL2, and a CDRL3, wherein:

[0119] (a) CDRL1, CDRL2, and CDRL3 have the sequence of SEQ ID NOS:5, 19, and 31, respectively;

[0120] (b) CDRL1, CDRL2, and CDRL3 have the sequence of SEQ ID NOS:6, 20, and 32, respectively;

[0121] (c) CDRL1, CDRL2, and CDRL3 have the sequence of SEQ ID NOS:6, 21, and 33, respectively;

[0122] (d) CDRL1, CDRL2, and CDRL3 have the sequence of SEQ ID NOS:6, 20, and 33, respectively;

[0123] (e) CDRL1, CDRL2, and CDRL3 have the sequence of SEQ ID NOS:7, 22, and 34, respectively;

[0124] (f) CDRL1, CDRL2, and CDRL3 have the sequence of SEQ ID NOS:8, 22, and 35, respectively;

[0125] (g) CDRL1, CDRL2, and CDRL3 have the sequence of SEQ ID NOS:9, 22, and 36, respectively;

[0126] (h) CDRL1, CDRL2, and CDRL3 have the sequence of SEQ ID NOS:10, 23, and 37, respectively;

[0127] (i) CDRL1, CDRL2, and CDRL3 have the sequence of SEQ ID NOS:11, 23, and 38, respectively;

[0128] (j) CDRL1, CDRL2, and CDRL3 have the sequence of SEQ ID NOS:12, 24, and 39, respectively;

[0129] (k) CDRL1, CDRL2, and CDRL3 have the sequence of SEQ ID NOS:13, 25, and 40, respectively;

[0130] (l) CDRL1, CDRL2, and CDRL3 have the sequence of SEQ ID NOS:14, 26, and 41, respectively; (m) CDRL1, CDRL2, and CDRL3 have the sequence of SEQ ID NOS:15, 27, and 42, respectively;

[0131] (n) CDRL1, CDRL2, and CDRL3 have the sequence of SEQ ID NOS:16, 28, and 43, respectively;

[0132] (o) CDRL1, CDRL2, and CDRL3 have the sequence of SEQ ID NOS:17, 29, and 44, respectively, or

[0133] (p) CDRL1, CDRL2, and CDRL3 have the sequence of SEQ ID NOS:18, 30, and 45, respectively.

[0134] In some embodiments, the TREM2 agonist antigen binding protein comprises a heavy chain variable region comprising a CDRH1, a CDRH2, and a CDRH3, wherein:

[0135] (a) CDRH1, CDRH2, and CDRH3 have the sequence of SEQ ID NOS:77, 87, and 95, respectively;

[0136] (b) CDRH1, CDRH2, and CDRH3 have the sequence of SEQ ID NOS:78, 88, and 96, respectively;

[0137] (c) CDRH1, CDRH2, and CDRH3 have the sequence of SEQ ID NOS:78, 88, and 97, respectively;

[0138] (d) CDRH1, CDRH2, and CDRH3 have the sequence of SEQ ID NOS:78, 89, and 96, respectively;

[0139] (e) CDRH1, CDRH2, and CDRH3 have the sequence of SEQ ID NOS:77, 90, and 98, respectively;

[0140] (f) CDRH1, CDRH2, and CDRH3 have the sequence of SEQ ID NOS:79, 90, and 99, respectively;

[0141] (g) CDRH1, CDRH2, and CDRH3 have the sequence of SEQ ID NOS:80, 91, and 100, respectively;

[0142] (h) CDRH1, CDRH2, and CDRH3 have the sequence of SEQ ID NOS:81, 91, and 101, respectively;

[0143] (i) CDRH1, CDRH2, and CDRH3 have the sequence of SEQ ID NOS:82, 92, and 102, respectively;

[0144] (j) CDRH1, CDRH2, and CDRH3 have the sequence of SEQ ID NOS:81, 91, and 103, respectively;

[0145] (k) CDRH1, CDRH2, and CDRH3 have the sequence of SEQ ID NOS:81, 91, and 104, respectively;

[0146] (l) CDRH1, CDRH2, and CDRH3 have the sequence of SEQ ID NOS:83, 93, and 105, respectively;

[0147] (m) CDRH1, CDRH2, and CDRH3 have the sequence of SEQ ID NOS:84, 91, and 106, respectively;

[0148] (n) CDRH1, CDRH2, and CDRH3 have the sequence of SEQ ID NOS:85, 91, and 107, respectively;

[0149] (o) CDRH1, CDRH2, and CDRH3 have the sequence of SEQ ID NOS:86, 94, and 108, respectively; or

[0150] (p) CDRH1, CDRH2, and CDRH3 have the sequence of SEQ ID NOS:85, 91, and 109, respectively.

[0151] In some embodiments, the TREM2 agonist antigen binding protein comprises a light chain variable region comprising a CDRL1, a CDRL2, and a CDRL3 and a heavy chain variable region comprising a CDRH1, a CDRH2, and a CDRH3, wherein:

[0152] (a) CDRL1, CDRL2, and CDRL3 have the sequence of SEQ ID NOS:5, 19, and 31, respectively, and CDRH1, CDRH2, and CDRH3 have the sequence of SEQ ID NOS:77, 87, and 95, respectively;

[0153] (b) CDRL1, CDRL2, and CDRL3 have the sequence of SEQ ID NOS:6, 20, and 32, respectively, and CDRH1, CDRH2, and CDRH3 have the sequence of SEQ ID NOS:78, 88, and 96, respectively;

[0154] (c) CDRL1, CDRL2, and CDRL3 have the sequence of SEQ ID NOS:6, 21, and 33, respectively, and CDRH1, CDRH2, and CDRH3 have the sequence of SEQ ID NOS:78, 88, and 97, respectively;

[0155] (d) CDRL1, CDRL2, and CDRL3 have the sequence of SEQ ID NOS:6, 20, and 33, respectively, and CDRH1, CDRH2, and CDRH3 have the sequence of SEQ ID NOS:78, 88, and 97, respectively;

[0156] (e) CDRL1, CDRL2, and CDRL3 have the sequence of SEQ ID NOS:6, 20, and 33, respectively, and CDRH1, CDRH2, and CDRH3 have the sequence of SEQ ID NOS:78, 89, and 96, respectively;

[0157] (f) CDRL1, CDRL2, and CDRL3 have the sequence of SEQ ID NOS:7, 22, and 34, respectively, and CDRH1, CDRH2, and CDRH3 have the sequence of SEQ ID NOS:77, 87, and 95, respectively;

[0158] (g) CDRL1, CDRL2, and CDRL3 have the sequence of SEQ ID NOS:8, 22, and 35, respectively, and CDRH1, CDRH2, and CDRH3 have the sequence of SEQ ID NOS:77, 90, and 98, respectively;

[0159] (h) CDRL1, CDRL2, and CDRL3 have the sequence of SEQ ID NOS:9, 22, and 36, respectively, and CDRH1, CDRH2, and CDRH3 have the sequence of SEQ ID NOS:79, 90, and 99, respectively;

[0160] (i) CDRL1, CDRL2, and CDRL3 have the sequence of SEQ ID NOS:10, 23, and 37, respectively, and CDRH1, CDRH2, and CDRH3 have the sequence of SEQ ID NOS:80, 91, and 100, respectively;

[0161] (j) CDRL1, CDRL2, and CDRL3 have the sequence of SEQ ID NOS:10, 23, and 37, respectively, and CDRH1, CDRH2, and CDRH3 have the sequence of SEQ ID NOS:81, 91, and 101, respectively;

[0162] (k) CDRL1, CDRL2, and CDRL3 have the sequence of SEQ ID NOS:11, 23, and 38, respectively, and CDRH1, CDRH2, and CDRH3 have the sequence of SEQ ID NOS:82, 92, and 102, respectively;

[0163] (l) CDRL1, CDRL2, and CDRL3 have the sequence of SEQ ID NOS:12, 24, and 39, respectively, and CDRH1, CDRH2, and CDRH3 have the sequence of SEQ ID NOS:81, 91, and 103, respectively;

[0164] (m) CDRL1, CDRL2, and CDRL3 have the sequence of SEQ ID NOS:13, 25, and 40, respectively, and CDRH1, CDRH2, and CDRH3 have the sequence of SEQ ID NOS:81, 91, and 104, respectively;

[0165] (n) CDRL1, CDRL2, and CDRL3 have the sequence of SEQ ID NOS:14, 26, and 41, respectively, and CDRH1, CDRH2, and CDRH3 have the sequence of SEQ ID NOS:83, 93, and 105, respectively;

[0166] (o) CDRL1, CDRL2, and CDRL3 have the sequence of SEQ ID NOS:15, 27, and 42, respectively, and CDRH1, CDRH2, and CDRH3 have the sequence of SEQ ID NOS:84, 91, and 106, respectively;

[0167] (p) CDRL1, CDRL2, and CDRL3 have the sequence of SEQ ID NOS:16, 28, and 43, respectively, and CDRH1, CDRH2, and CDRH3 have the sequence of SEQ ID NOS:85, 91, and 107, respectively;

[0168] (q) CDRL1, CDRL2, and CDRL3 have the sequence of SEQ ID NOS:17, 29, and 44, respectively, and CDRH1, CDRH2, and CDRH3 have the sequence of SEQ ID NOS:86, 94, and 108, respectively; or

[0169] (r) CDRL1, CDRL2, and CDRL3 have the sequence of SEQ ID NOS:18, 30, and 45, respectively, and CDRH1, CDRH2, and CDRH3 have the sequence of SEQ ID NOS:85, 91, and 109, respectively.

[0170] In some embodiments, the TREM2 agonist antigen binding protein comprises a light chain variable region comprising a CDRL1, a CDRL2, and a CDRL3 and a heavy chain variable region comprising a CDRH1, a CDRH2, and a CDRH3, wherein CDRL1, CDRL2, and CDRL3 have the sequence of SEQ ID NOS:10, 23, and 37, respectively, and CDRH1, CDRH2, and CDRH3 have the sequence of SEQ ID NOS:80, 91, and 100, respectively. In some embodiments, the TREM2 agonist antigen binding protein comprises a light chain variable region comprising a CDRL1, a CDRL2, and a CDRL3 and a heavy chain variable region comprising a CDRH1, a CDRH2, and a CDRH3, wherein CDRL1, CDRL2, and CDRL3 have the sequence of SEQ ID NOS:10, 23, and 37, respectively, and CDRH1, CDRH2, and CDRH3 have the sequence of SEQ ID NOS:81, 91, and 101, respectively. In some embodiments, the TREM2 agonist antigen binding protein comprises a light chain variable region comprising a CDRL1, a CDRL2, and a CDRL3 and a heavy chain variable region comprising a CDRH1, a CDRH2, and a CDRH3, wherein CDRL1, CDRL2, and CDRL3 have the sequence of SEQ ID NOS:15, 27, and 42, respectively, and CDRH1, CDRH2, and CDRH3 have the sequence of SEQ ID NOS:84, 91, and 106, respectively. In some embodiments, the TREM2 agonist antigen binding protein comprises a light chain variable region comprising a CDRL1, a CDRL2, and a CDRL3 and a heavy chain variable region comprising a CDRH1, a CDRH2, and a CDRH3, wherein CDRL1, CDRL2, and CDRL3 have the sequence of SEQ ID NOS:16, 28, and 43, respectively, and CDRH1, CDRH2, and CDRH3 have the sequence of SEQ ID NOS:85, 91, and 107, respectively. In some embodiments, the TREM2 agonist antigen binding protein comprises a light chain variable region comprising a CDRL1, a CDRL2, and a CDRL3 and a heavy chain variable region comprising a CDRH1, a CDRH2, and a CDRH3, wherein CDRL1, CDRL2, and CDRL3 have the sequence of SEQ ID NOS:17, 29, and 44, respectively, and CDRH1, CDRH2, and CDRH3 have the sequence of SEQ ID NOS:86, 94, and 108, respectively. In some embodiments, the TREM2 agonist antigen binding protein comprises a light chain variable region comprising a CDRL1, a CDRL2, and a CDRL3 and a heavy chain variable region comprising a CDRH1, a CDRH2, and a CDRH3, wherein CDRL1, CDRL2, and CDRL3 have the sequence of SEQ ID NOS:8, 22, and 35, respectively, and CDRH1, CDRH2, and CDRH3 have the sequence of SEQ ID NOS:77, 90, and 98, respectively.

[0171] In some embodiments, the TREM2 agonist antigen binding proteins comprise a light chain variable region comprising a sequence selected from SEQ ID NOS:46-63 and a heavy chain variable region comprising a sequence selected from SEQ ID NOS:110-126. In some embodiments, the TREM2 agonist antigen binding protein comprises a light chain variable region comprising the sequence of SEQ ID NO:46 and a heavy chain variable region comprising the sequence of SEQ ID NO:110. In some embodiments, the TREM2 agonist antigen binding protein comprises a light chain variable region comprising the sequence of SEQ ID NO:47 and a heavy chain variable region comprising the sequence of SEQ ID NO:111. In some embodiments, the TREM2 agonist antigen binding protein comprises a light chain variable region comprising the sequence of SEQ ID NO:48 and a heavy chain variable region comprising the sequence of SEQ ID NO:112. In some embodiments, the TREM2 agonist antigen binding protein comprises a light chain variable region comprising the sequence of SEQ ID NO:49 and a heavy chain variable region comprising the sequence of SEQ ID NO:113. In some embodiments, the TREM2 agonist antigen binding protein comprises a light chain variable region comprising the sequence of SEQ ID NO:50 and a heavy chain variable region comprising the sequence of SEQ ID NO:114. In some embodiments, the TREM2 agonist antigen binding protein comprises a light chain variable region comprising the sequence of SEQ ID NO:51 and a heavy chain variable region comprising the sequence of SEQ ID NO:110. In some embodiments, the TREM2 agonist antigen binding protein comprises a light chain variable region comprising the sequence of SEQ ID NO:53 and a heavy chain variable region comprising the sequence of SEQ ID NO:116. In some embodiments, the TREM2 agonist antigen binding protein comprises a light chain variable region comprising the sequence of SEQ ID NO:54 and a heavy chain variable region comprising the sequence of SEQ ID NO:117. In some embodiments, the TREM2 agonist antigen binding protein comprises a light chain variable region comprising the sequence of SEQ ID NO:55 and a heavy chain variable region comprising the sequence of SEQ ID NO:118. In some embodiments, the TREM2 agonist antigen binding protein comprises a light chain variable region comprising the sequence of SEQ ID NO:56 and a heavy chain variable region comprising the sequence of SEQ ID NO:119. In some embodiments, the TREM2 agonist antigen binding protein comprises a light chain variable region comprising the sequence of SEQ ID NO:57 and a heavy chain variable region comprising the sequence of SEQ ID NO:120. In some embodiments, the TREM2 agonist antigen binding protein comprises a light chain variable region comprising the sequence of SEQ ID NO:58 and a heavy chain variable region comprising the sequence of SEQ ID NO:121. In some embodiments, the TREM2 agonist antigen binding protein comprises a light chain variable region comprising the sequence of SEQ ID NO:59 and a heavy chain variable region comprising the sequence of SEQ ID NO:122. In some embodiments, the TREM2 agonist antigen binding protein comprises a light chain variable region comprising the sequence of SEQ ID NO:60 and a heavy chain variable region comprising the sequence of SEQ ID NO:123. In some embodiments, the TREM2 agonist antigen binding protein comprises a light chain variable region comprising the sequence of SEQ ID NO:61 and a heavy chain variable region comprising the sequence of SEQ ID NO:124. In some embodiments, the TREM2 agonist antigen binding protein comprises a light chain variable region comprising the sequence of SEQ ID NO:62 and a heavy chain variable region comprising the sequence of SEQ ID NO:125. In some embodiments, the TREM2 agonist antigen binding protein comprises a light chain variable region comprising the sequence of SEQ ID NO:63 and a heavy chain variable region comprising the sequence of SEQ ID NO:126. In yet another embodiment, the TREM2 agonist antigen binding protein comprises a light chain variable region comprising the sequence of SEQ ID NO:52 and a heavy chain variable region comprising the sequence of SEQ ID NO:115.

[0172] In some embodiments, the TREM2 agonist antigen binding protein may comprise a light chain variable region selected from LV-01, LV-02, LV-03, LV-04, LV-05, LV-06, LV-07, LV-08, LV-09, LV-10, LV-11, LV-12, LV-13, LV-14, LV-15, LV-16, LV-17, and LV-18, as shown in TABLE A1, and/or a heavy chain variable region selected from HV-01, HV-02, HV-03, HV-04, HV-05, HV-06, HV-07, HV-08, HV-09, HV-10, HV-11, HV-12, HV-13, HV-14, HV-15, HV-16, and HV-17, as shown in TABLE A2, and functional fragments, derivatives, muteins and variants of these light chain and heavy chain variable regions.

[0173] In some embodiments, each of the light chain variable regions listed in TABLE Almay be combined with any of the heavy chain variable regions listed in TABLE A2 to form an anti-TREM2 binding domain of the antigen binding proteins of the invention. Examples of such combinations include, but are not limited to: LV-01 (SEQ ID NO:46) and HV-01 (SEQ ID NO:110); LV-02 (SEQ ID NO:47) and HV-02 (SEQ ID NO:111); LV-03 (SEQ ID NO:48) and HV-03 (SEQ ID NO:112); LV-04 (SEQ ID NO:49) and HV-04 (SEQ ID NO:113); LV-05 (SEQ ID NO:50) and HV-05 (SEQ ID NO:114); LV-06 (SEQ ID NO:51) and HV-01 (SEQ ID NO:110); LV-07 (SEQ ID NO:52) and HV-06 (SEQ ID NO:115); LV-08 (SEQ ID NO:53) and HV-07 (SEQ ID NO:116); LV-09 (SEQ ID NO:54) and HV-08 (SEQ ID NO:117); LV-10 (SEQ ID NO:55) and HV-09 (SEQ ID NO:118); LV-11 (SEQ ID NO:56) and HV-10 (SEQ ID NO:119); LV-12 (SEQ ID NO:57) and HV-11 (SEQ ID NO:120); LV-13 (SEQ ID NO:58) and HV-12 (SEQ ID NO:121); LV-14 (SEQ ID NO:59) and HV-13 (SEQ ID NO:122); LV-15 (SEQ ID NO:60) and HV-14 (SEQ ID NO:123); LV-16 (SEQ ID NO:61) and HV-15 (SEQ ID NO:124); LV-17 (SEQ ID NO:62) and HV-16 (SEQ ID NO:125); and LV-18 (SEQ ID NO:63) and HV-17 (SEQ ID NO:126).

[0174] In certain embodiments, the TREM2 agonist antigen binding proteins of the invention comprise a light chain variable region comprising the sequence of LV-09 (SEQ ID NO:54) and a heavy chain variable region comprising the sequence of HV-08 (SEQ ID NO:117). In some embodiments, the TREM2 agonist antigen binding proteins of the invention comprise a light chain variable region comprising the sequence of LV-10 (SEQ ID NO:55) and a heavy chain variable region comprising the sequence of HV-09 (SEQ ID NO:118). In other embodiments, the TREM2 agonist antigen binding proteins of the invention comprise a light chain variable region comprising the sequence of LV-15 (SEQ ID NO:60) and a heavy chain variable region comprising the sequence of HV-14 (SEQ ID NO:123). In still other embodiments, the TREM2 agonist antigen binding proteins of the invention comprise a light chain variable region comprising the sequence of LV-16 (SEQ ID NO:61) and a heavy chain variable region comprising the sequence of HV-15 (SEQ ID NO:124). In some embodiments, the TREM2 agonist antigen binding proteins of the invention comprise a light chain variable region comprising the sequence of LV-17 (SEQ ID NO:62) and a heavy chain variable region comprising the sequence of HV-16 (SEQ ID NO:125). In certain embodiments, the TREM2 agonist antigen binding proteins of the invention comprise a light chain variable region comprising the sequence of LV-07 (SEQ ID NO:52) and a heavy chain variable region comprising the sequence of HV-06 (SEQ ID NO:115).

[0175] In some embodiments, the TREM2 agonist antigen binding proteins comprise a light chain variable region comprising a sequence of contiguous amino acids that differs from the sequence of a light chain variable region in TABLE A1, i.e. a VL selected from LV-01, LV-02, LV-03, LV-04, LV-05, LV-06, LV-07, LV-08, LV-09, LV-10, LV-11, LV-12, LV-13, LV-14, LV-15, LV-16, LV-17, or LV-18, at only 1, 2, 3, 4, 5, 6, 7, 8, 9, 10, 11, 12, 13, 14 or 15 amino acid residues, wherein each such sequence difference is independently either a deletion, insertion or substitution of one amino acid, with the deletions, insertions and/or substitutions resulting in no more than 15 amino acid changes relative to the foregoing variable domain sequences. The light chain variable region in some TREM2 agonist antigen binding proteins comprises a sequence of amino acids that has at least 70%, at least 75%, at least 80%, at least 85%, at least 90%, at least 95%, at least 97% or at least 99% sequence identity to the amino acid sequences of SEQ ID NOS:46-63 (i.e. the light chain variable regions in TABLE A1). In one embodiment, the TREM2 agonist antigen binding protein comprises a light chain variable region comprising a sequence that is at least 90% identical to a sequence selected from SEQ ID NOS:46-63. In another embodiment, the TREM2 agonist antigen binding protein comprises a light chain variable region comprising a sequence that is at least 95% identical to a sequence selected from SEQ ID NOS:46-63. In yet another embodiment, the TREM2 agonist antigen binding protein comprises a light chain variable region comprising a sequence selected from SEQ ID NOS:46-63. In some embodiments, the TREM2 agonist antigen binding protein comprises a light chain variable region comprising a sequence of SEQ ID NO:54. In other embodiments, the TREM2 agonist antigen binding protein comprises a light chain variable region comprising a sequence of SEQ ID NO:55. In yet other embodiments, the TREM2 agonist antigen binding protein comprises a light chain variable region comprising a sequence of SEQ ID NO:60. In still other embodiments, the TREM2 agonist antigen binding protein comprises a light chain variable region comprising a sequence of SEQ ID NO:61. In certain embodiments, the TREM2 agonist antigen binding protein comprises a light chain variable region comprising a sequence of SEQ ID NO:62. In other embodiments, the TREM2 agonist antigen binding protein comprises a light chain variable region comprising a sequence of SEQ ID NO:52.

[0176] In these and other embodiments, the TREM2 agonist antigen binding proteins comprise a heavy chain variable region comprising a sequence of contiguous amino acids that differs from the sequence of a heavy chain variable region in TABLE A2, i.e., a VH selected from HV-01, HV-02, HV-03, HV-04, HV-05, HV-06, HV-07, HV-08, HV-09, HV-10, HV-11, HV-12, HV-13, HV-14, HV-15, HV-16, or HV-17, at only 1, 2, 3, 4, 5, 6, 7, 8, 9, 10, 11, 12, 13, 14 or 15 amino acid residues, wherein each such sequence difference is independently either a deletion, insertion or substitution of one amino acid, with the deletions, insertions and/or substitutions resulting in no more than 15 amino acid changes relative to the foregoing variable domain sequences. The heavy chain variable region in some TREM2 agonist antigen binding proteins comprises a sequence of amino acids that has at least 70%, at least 75%, at least 80%, at least 85%, at least 90%, at least 95%, at least 97% or at least 99% sequence identity to the amino acid sequences of SEQ ID NOS:110-126 (i.e. the heavy chain variable regions in TABLE A2). In one embodiment, the TREM2 agonist antigen binding protein comprises a heavy chain variable region comprising a sequence that is at least 90% identical to a sequence selected from SEQ ID NOS:110-126. In another embodiment, the TREM2 agonist antigen binding protein comprises a heavy chain variable region comprising a sequence that is at least 95% identical to a sequence selected from SEQ ID NOS:110-126. In yet another embodiment, the TREM2 agonist antigen binding protein comprises a heavy chain variable region comprising a sequence selected from SEQ ID NOS:110-126. In some embodiments, the TREM2 agonist antigen binding protein comprises a heavy chain variable region comprising a sequence of SEQ ID NO:117. In other embodiments, the TREM2 agonist antigen binding protein comprises a heavy chain variable region comprising a sequence of SEQ ID NO:118. In yet other embodiments, the TREM2 agonist antigen binding protein comprises a heavy chain variable region comprising a sequence of SEQ ID NO:123. In still other embodiments, the TREM2 agonist antigen binding protein comprises a heavy chain variable region comprising a sequence of SEQ ID NO:124. In certain embodiments, the TREM2 agonist antigen binding protein comprises a heavy chain variable region comprising a sequence of SEQ ID NO:125. In other embodiments, the TREM2 agonist antigen binding protein comprises a heavy chain variable region comprising a sequence of SEQ ID NO:115.

[0177] In some embodiments, variants of the anti-TREM2 antibodies can be generated by substituting one or more amino acids in the light chain or heavy chain variable regions to address chemical liabilities (e.g., aspartate isomerization, asparagine deamidation, tryptophan and methionine oxidation) or correct covariance violations (see e.g., WO 2012/125495, which is hereby incorporated by reference in its entirety). Such variants can have improved biophysical, expression, and/or stability properties as compared with the parental antibody. In some embodiments, the TREM2 agonist antigen binding proteins of the invention comprise a light chain variable region and/or heavy chain variable region having one or more of the amino acid substitutions set forth in any of TABLES A3-A4 below.

[0178] In some embodiments, additional variants of the anti-TREM2 antibodies described herein can be generated by affinity modulating any of the anti-TREM2 antibodies described herein. An “affinity-modulated antibody” is an antibody that comprises one or more amino acid substitutions in its light chain variable region sequence and/or heavy chain variable region sequence that increases or decreases the affinity of the antibody for the target antigen as compared to the parental antibody that does not contain the amino acid substitutions. Antibody affinity modulation methods are known to those of skill in the art and can include CDR walking mutagenesis (Yang et al., J. Mol. Biol., 254, 392-403, 1995), chain shuffling (Marks et al., Bio/Technology, 10, 779-783, 1992), use of mutation strains of E. coli (Low et al., J. Mol. Biol., 250, 350-368, 1996), DNA shuffling (Patten et al., Curr. Opin. Biotechnol., 1997, 8:724-733), phage display (Thompson et al., J. Mol. Biol., 1996, 256:7-88), PCR techniques (Crameri, et al., Nature, 1998, 391:288-291), and other mutagenesis strategies (Barbas et al., Proc Nat. Acad. Sci. USA 91:3809-3813, 1994; Schier et al., Gene 169:147-155, 1995; Yelton et al., J. Immunol. 155:1994-2004, 1995; Jackson et al., J. Immunol. 154(7):3310-9, 1995; and Hawkins et al., J. Mol. Biol., 1992, 226:889-896). Methods of affinity modulation are discussed in Hoogenboom, Trends in Biotechnology, 1995, 15:62-70, and Vaughan et al., Nature Biotechnology, 1998, 16535-539. One specific method for generating affinity-modulated variants of the anti-TREM2 antibodies described herein is the use of a yeast-display Fab mutagenesis library.

[0179] In some embodiments, the TREM2 agonist antigen binding proteins comprise a light chain variable region that is a variant of a light chain variable region of any of the anti-TREM2 antibodies described herein. Thus, in some embodiments, the light chain variable region of the TREM2 agonist antigen binding proteins comprises a sequence that is at least 90% identical, at least 91% identical, at least 92% identical, at least 93% identical, at least 94% identical, or at least 95% identical to a sequence selected from SEQ ID NOS:46-63. In some embodiments, the TREM2 agonist antigen binding proteins can comprise a light chain variable region from any of the engineered anti-TREM2 antibody variants set forth in TABLES A3-A4 below.

[0180] In some embodiments, the TREM2 agonist antigen binding protein comprises a light chain variable region comprising the sequence of SEQ ID NO:54 with a mutation at one or more amino acid positions 64, 79, 80, 85, 94, and/or 100. In some such embodiments, the mutation is V64G, V64A, Q79E, Q79D, S80P, S80A, F85V, F85L, F85A, F85D, F851, F85L, F85M, F85T, W94F, W94Y, W94S, W94T, W94A, W94H, W94I, W94Q, P100R, P100Q, P100G, or combinations thereof. In another embodiment, the TREM2 agonist antigen binding protein comprises a light chain variable region comprising the sequence of SEQ ID NO:55 with a mutation at one or more amino acid positions 64, 79, 80, 94, and/or 100. Such mutations can include V64G, V64A, Q79E, Q79D, S80P, S80A, W94F, W94Y, W94S, W94T, W94A, W94H, W94I, W94Q, P100R, P100Q, P100G, or combinations thereof. In certain embodiments, the mutation is V64G, V64A, Q79E, S80P, S80A, W94Y, W94S, P100R, P100Q, or combinations thereof. In another embodiment, the TREM2 agonist antigen binding protein comprises a light chain variable region comprising the sequence of SEQ ID NO:60 with a mutation at one or more amino acid positions 60, 92, and/or 93. The mutation in such embodiments can be selected from L605, L60P, L60D, L60A, D92E, D92Q, D92T, D92N, S93A, S93N, S93Q, S93V, or combinations thereof. In yet another embodiment, the TREM2 agonist antigen binding protein comprises a light chain variable region comprising the sequence of SEQ ID NO:61 with a mutation at one or more amino acid positions 56, 57, 92, and/or 93. In such embodiments, the mutation can be N56S, N56T, N56Q, N56E, G57A, G57V, D92E, D92Q, D92T, D92N, S93A, S93N, S93Q, S93V, or combinations thereof. In certain embodiments, the mutation is N56S, N56Q, G57A, D92E, D92Q, S93A, or combinations thereof. In still another embodiment, the TREM2 agonist antigen binding protein comprises a light chain variable region comprising the sequence of SEQ ID NO:62 with a mutation at amino acid position 36, 46, 61 and/or 100. Such mutations can include F36Y, S46L, 546R, S46V, S46F, K61R, P100Q, P100G, P100R or combinations thereof. In particular embodiments, the mutation is F36Y, K61R, P100Q, or combinations thereof. In another embodiment, the TREM2 agonist antigen binding protein comprises a light chain variable region comprising the sequence of SEQ ID NO:52 with a mutation at amino acid position 91, which can be selected from F91V, F91I, F91T, F91L, or F91D. In one embodiment, the mutation is F91V.

[0181] In some embodiments, the TREM2 agonist antigen binding proteins comprise a heavy chain variable region that is a variant of a heavy chain variable region from any of the anti-TREM2 antibodies described herein. Thus, in some embodiments, the heavy chain variable region of the TREM2 agonist antigen binding proteins comprises a sequence that is at least 90% identical, at least 91% identical, at least 92% identical, at least 93% identical, at least 94% identical, or at least 95% identical to a sequence selected from SEQ ID NOS:110-126. For instance, the TREM2 agonist antigen binding proteins can comprise a heavy chain variable region from any of the engineered anti-TREM2 antibody variants set forth in TABLES A3-A4 below. In one embodiment, the TREM2 agonist antigen binding protein comprises a heavy chain variable region comprising the sequence of SEQ ID NO:117 with a mutation at one or more amino acid positions 19, 55, 56, 57, 58, and/or 104. In some such embodiments, the mutation is M19K, M19R, M19T, M19E, M19N, M19Q, D55E, D55Q, D55N, D55T, S56A, S56Q, S56V, D57S, D57E, D57Q, T58A, T58V, W104F, W104Y, W104T, W104S, W104A, W104H, W104I, W104Q, or combinations thereof. In another embodiment, the TREM2 agonist antigen binding protein comprises a heavy chain variable region comprising the sequence of SEQ ID NO:118 with a mutation at one or more amino acid positions 19, 55, 56, 57, 58, and/or 104. Such mutations can include M19K, M19R, M19T, M19E, M19N, M19Q, D55E, D55Q, D55N, D55T, S56A, S56Q, S56V, D57S, D57E, D57Q, T58A, T58V, W104F, W104Y, W104T, W104S, W104A, W104H, W104I, W104Q, or combinations thereof. In certain embodiments, the mutation is M19K, D55E, S56A, D57E, T58A, W104Y, W104T, or combinations thereof. In another embodiment, the TREM2 agonist antigen binding protein comprises a heavy chain variable region comprising the sequence of SEQ ID NO:123 with a mutation at one or more amino acid positions 27, 55, 56, 57, 58, 105, and/or 106. In some embodiments, the mutation is selected from H27Y, H27D, H27F, H27N, D55E, D55Q, D55N, D55T, S56A, S56Q, S56V, D57S, D57E, D57Q, T58A, T58V, D105E, D105Q, D105T, D105N, D105G, S106A, S106Q, S106V, S106T, or combinations thereof. In yet another embodiment, the TREM2 agonist antigen binding protein comprises a heavy chain variable region comprising the sequence of SEQ ID NO:124 with a mutation at one or more amino acid positions 55, 56, 57, 58, 105, and/or 106. The mutation in such embodiments can be selected from D55E, D55Q, D55N, D55T, S56A, S56Q, S56V, D57S, D57E, D57Q, T58A, T58V, D105E, D105Q, D105T, D105N, D105G, S106A, S106Q, S106V, S106T, or combinations thereof. In certain embodiments, the mutation is D55E, D55Q, S56A, D57E, T58A, D105E, D105N, S106A, or combinations thereof. In still another embodiment, the TREM2 agonist antigen binding protein comprises a heavy chain variable region comprising the sequence of SEQ ID NO:125 with a mutation at one or more amino acid positions 43, 76, 85, 99, 100, and/or 116. Such mutations can include L43Q, L43K, L43H, I76T, R85S, R85G, R85N, R85D, D99E, D99Q, D99S, D99T, G100A, G100Y, G100V, T116L, T116M, T116P, T116R, or combinations thereof. In certain embodiments, the mutation is L43Q, R85S, D99E, G100A, G100Y, T116L, or combinations thereof. In another embodiment, the TREM2 agonist antigen binding protein comprises a heavy chain variable region comprising the sequence of SEQ ID NO:115 with a mutation at amino acid position 62 and/or 63. In such embodiments, the mutation can be selected from D62E, D62Q, D62T, D62N, S63A, S63Q, S63V, or combinations thereof. In some embodiments, the mutation is D62E, D62Q, S63A, or combinations thereof. In some embodiments, the TREM2 agonist antigen binding proteins comprise a light chain variable region and/or heavy chain variable region from any of the anti-TREM2 variant antibodies set forth in TABLES A3, A4, A4, A5, A6, A7, and A8. Accordingly, in some embodiments, the light chain variable region of the TREM2 agonist antigen binding proteins comprises a sequence that is at least 90% identical, at least 91% identical, at least 92% identical, at least 93% identical, at least 94% identical, or at least 95% identical to a sequence selected from SEQ ID NOS:61, 153-162, and 295-300. In these and other embodiments, the heavy chain variable region of the TREM2 agonist antigen binding proteins comprises a sequence that is at least 90% identical, at least 91% identical, at least 92% identical, at least 93% identical, at least 94% identical, or at least 95% identical to a sequence selected from SEQ ID NOS:124, 180-190, and 307-312.

[0182] In some embodiments, the TREM2 agonist antigen binding protein comprises a light chain variable region comprising the sequence of SEQ ID NO:54 with a mutation at one or more amino acid positions 64, 79, 80, 85, 94, and/or 100. Such mutations can include V64G, V64A, Q79E, Q79D, S80P, S80A, F85V, F85L, F85A, F85D, F851, F85L, F85M, F85T, W94F, W94Y, W94S, W94T, W94A, W94H, W94I, W94Q, P100R, P100Q, P100G, or combinations thereof. In these and other embodiments, the TREM2 agonist antigen binding protein comprises a heavy chain variable region comprising the sequence of SEQ ID NO:117 with a mutation at one or more amino acid positions 19, 55, 56, 57, 58, and/or 104. In certain embodiments, the mutation is selected from M19K, M19R, M19T, M19E, M19N, M19Q, D55E, D55Q, D55N, D55T, S56A, S56Q, S56V, D57S, D57E, D57Q, T58A, T58V, W104F, W104Y, W104T, W104S, W104A, W104H, W104I, W104Q, or combinations thereof.

[0183] In other embodiments, the TREM2 agonist antigen binding protein comprises a light chain variable region comprising the sequence of SEQ ID NO:55 with a mutation at one or more amino acid positions 64, 79, 80, 94, and/or 100. In some embodiments, the mutation is selected from V64G, V64A, Q79E, Q79D, S80P, S80A, W94F, W94Y, W94S, W94T, W94A, W94H, W94I, W94Q, P100R, P100Q, P100G, or combinations thereof. In certain embodiments, the mutation is selected from V64G, V64A, Q79E, S80P, S80A, W94Y, W94S, P100R, P100Q, or combinations thereof. For instance, in some embodiments, the TREM2 agonist antigen binding protein comprises a light chain variable region comprising the sequence of SEQ ID NO:55 with one or more mutations selected from V64G, Q79E, S80P, W94Y, and P100Q. In these and other embodiments, the TREM2 agonist antigen binding protein comprises a heavy chain variable region comprising the sequence of SEQ ID NO:118 with a mutation at one or more amino acid positions 19, 55, 56, 57, 58, and/or 104. Such mutations can include M19K, M19R, M19T, M19E, M19N, M19Q, D55E, D55Q, D55N, D55T, S56A, S56Q, S56V, D57S, D57E, D57Q, T58A, T58V, W104F, W104Y, W104T, W104S, W104A, W104H, W104I, W104Q, or combinations thereof. In certain embodiments, the mutation is selected from M19K, D55E, S56A, D57E, T58A, W104Y, W104T, or combinations thereof.

[0184] In certain other embodiments, the TREM2 agonist antigen binding protein comprises a light chain variable region comprising the sequence of SEQ ID NO:60 with a mutation at one or more amino acid positions 60, 92, and/or 93. The mutation can be selected from L605, L60P, L60D, L60A, D92E, D92Q, D92T, D92N, S93A, S93N, S93Q, S93V, or combinations thereof. In these and other embodiments, the TREM2 agonist antigen binding protein comprises a heavy chain variable region comprising the sequence of SEQ ID NO:123 with a mutation at one or more amino acid positions 27, 55, 56, 57, 58, 105, and/or 106. In some embodiments, the mutation is selected from H27Y, H27D, H27F, H27N, D55E, D55Q, D55N, D55T, S56A, S56Q, S56V, D57S, D57E, D57Q, T58A, T58V, D105E, D105Q, D105T, D105N, D105G, S106A, S106Q, S106V, S106T, or combinations thereof.

[0185] In some embodiments, the TREM2 agonist antigen binding protein comprises a light chain variable region comprising the sequence of SEQ ID NO:61 with a mutation at one or more amino acid positions 56, 57, 92, and/or 93. In certain embodiments, the mutation is selected from N56S, N56T, N56Q, N56E, G57A, G57V, D92E, D92Q, D92T, D92N, S93A, S93N, S93Q, S93V, or combinations thereof. In some embodiments, the mutation is selected from N56S, N56Q, G57A, D92E, D92Q, S93A, or combinations thereof. In particular embodiments, the TREM2 agonist antigen binding protein comprises a light chain variable region comprising the sequence of SEQ ID NO:61 with one or more mutations selected from N56S, D92E, and S93A. In these and other embodiments, the TREM2 agonist antigen binding protein comprises a heavy chain variable region comprising the sequence of SEQ ID NO:124 with a mutation at one or more amino acid positions 55, 56, 57, 58, 105, and/or 106. The mutation can be selected from D55E, D55Q, D55N, D55T, S56A, S56Q, S56V, D57S, D57E, D57Q, T58A, T58V, D105E, D105Q, D105T, D105N, D105G, S106A, S106Q, S106V, S106T, or combinations thereof. In certain embodiments, the mutation is D55E, D55Q, S56A, D57E, T58A, D105E, D105N, S106A, or combinations thereof. In some embodiments, the TREM2 agonist antigen binding protein comprises a heavy chain variable region comprising the sequence of SEQ ID NO:124 with one or more mutations selected from D55E, S56A, D57E, D105E, and S106A.

[0186] In other embodiments, the TREM2 agonist antigen binding protein comprises a light chain variable region comprising the sequence of SEQ ID NO:62 with a mutation at amino acid position 36, 46, 61 and/or 100. In particular embodiments, the mutation is selected from F36Y, S46L, S46R, S46V, S46F, K61R, P100Q, P100G, P100R or combinations thereof. In some embodiments, the mutation is F36Y, K61R, P100Q, or combinations thereof. In some embodiments, the mutation is S46L, P100Q, or combinations thereof. In these and other embodiments, the TREM2 agonist antigen binding protein comprises a heavy chain variable region comprising the sequence of SEQ ID NO:125 with a mutation at one or more amino acid positions 43, 76, 85, 99, 100, and/or 116. The mutation can be selected from L43Q, L43K, L43H, I76T, R85S, R85G, R85N, R85D, D99E, D99Q, D99S, D99T, G100A, G100Y, G100V, T116L, T116M, T116P, T116R, or combinations thereof. In certain embodiments, the mutation is L43Q, I76T, R85S, D99E, G100A, G100Y, T116L, or combinations thereof.

[0187] In still other embodiments, the TREM2 agonist antigen binding protein comprises a light chain variable region comprising the sequence of SEQ ID NO:52 with a mutation at amino acid position 91. The mutation can be selected from F91V, F91I, F91T, F91L, or F91D. In one embodiment, the mutation is F91V. In these and other embodiments, the TREM2 agonist antigen binding protein comprises a heavy chain variable region comprising the sequence of SEQ ID NO:115 with a mutation at amino acid position 62 and/or 63. In particular embodiments, the mutation is selected from D62E, D62Q, D62T, D62N, S63A, S63Q, S63V, or combinations thereof. In some embodiments, the mutation is selected from D62E, D62Q, S63A, or combinations thereof.

TABLE A3
Engineered Variants of 10E3 Antibody

| | | | | |
|---|---|---|---|---|
| Position in 10E3 | | | | |
| VL Sequence or | | | Parent Amino | Amino Acid |
| VH sequence | Region | Hot Spot | Acid | Substitutions |

Light chain variable sequence (SEQ ID NO: 54)

| | | | | |
|---|---|---|---|---|
| 64 | FR3 | Covariance violator | V | G, A |
| 79 | FR3 | Covariance violator | Q | E, D |
| 80 | FR3 | Covariance violator | S | P, A |
| 85 | FR3 | Covariance violator | F | V, L, A, D, I, L, M, T |
| 94 | CDR3 | Potential Tryptophan | W | F, Y, S, T, A, H, I, Q |
| | | Oxidation Site | | |
| 100 | FR4 | Covariance violator | P | R, Q, G |

Heavy chain variable sequence (SEQ ID NO: 117)

| | | | | |
|---|---|---|---|---|
| 19 | FR1 | Covariance violator | M | K, R, T, E, N, Q |
| 55-56 | CDR2 | Potential Isomerization Site | DS | ES, QS, DA, NS, DQ, |
| | | | | TS, DV |
| 57-58 | CDR2 | Potential Isomerization Site | DT | ST, ET, DA, DV, QT |
| 104 | CDR3 | Potential Tryptophan | W | F, Y, T, S, A, H, I, Q |
| | | Oxidation Site | | |

TABLE A4
Engineered Variants of 13E7 Antibody

| | | | | |
|---|---|---|---|---|
| Position in 13E7 | | | | |
| VL Sequence or | | | Parent Amino | Amino Acid |
| VH sequence | Region | Hot Spot | Acid | Substitutions |

Light chain variable sequence (SEQ ID NO: 55)

| | | | | |
|---|---|---|---|---|
| 64 | FR3 | Covariance violator | V | G, A |
| 79 | FR3 | Covariance violator | Q | E, D |
| 80 | FR3 | Covariance violator | S | P, A |
| 94 | CDR3 | Potential Tryptophan | W | F, Y, S, T, A, H, I, Q |
| | | Oxidation Site | | |
| 100 | FR4 | Covariance violator | P | R, Q, G |

Heavy chain variable sequence (SEQ ID NO: 118)

| | | | | |
|---|---|---|---|---|
| 19 | FR1 | Covariance violator | M | K, R, T, E, N, Q |
| 55-56 | CDR2 | Potential Isomerization Site | DS | ES, QS, DA, DQ, NS, |
| | | | | TS, DV |
| 57-58 | CDR2 | Potential Isomerization Site | DT | ST, ET, DA, DV, QT |
| 104 | CDR3 | Potential Tryptophan | W | F, Y, T, S, A, H, I, Q |
| | | Oxidation Site | | |

TABLE A5
Engineered Variants of 4C5 Antibody

| | | | | |
|---|---|---|---|---|
| Position in 4C5 | | | | |
| VL Sequence or | | | Parent Amino | Amino Acid |
| VH sequence | Region | Hot Spot | Acid | Substitutions |

Light chain variable sequence (SEQ ID NO: 60)

| | | | | |
|---|---|---|---|---|
| 60 | FR3 | Covariance violator | L | S, P, D, A |
| 92-93 | CDR3 | Potential Isomerization Site | DS | ES, QS, DA, DN, DQ, |
| | | | | TS, NS, DV |

Heavy chain variable sequence (SEQ ID NO: 123)

| | | | | |
|---|---|---|---|---|
| 27 | FR1 | Covariance violator | H | Y, D, F, N |
| 55-56 | CDR2 | Potential Isomerization Site | DS | ES, QS, DA, DQ, DV, |
| | | | | TS, NS |
| 57-58 | CDR2 | Potential Isomerization Site | DT | ST, ET, DA, DV, QT |
| 105-106 | CDR3 | Potential Isomerization Site | DS | ES, QS, DA, DQ, DV, |
| | | | | TS, NS, GT |

TABLE A6
Engineered Variants of 6E7 Antibody

| | | | | |
|---|---|---|---|---|
| Position in 6E7 | | | | |
| VL Sequence or | | | Parent | Amino Acid |
| VH sequence | Region | Hot Spot | Amino Acid | Substitutions |

Light chain variable sequence (SEQ ID NO: 61)

| | | | | |
|---|---|---|---|---|
| 56-57 | CDR2/FR3 | Potential Deamidation Site | NG | SG, TG, QG, NA, EG, |
| | boundary | | | NV |
| 92-93 | CDR3 | Potential Isomerization Site | DS | ES, QS, DA, DN, DQ, |
| | | | | DV, TS, NS |

Heavy chain variable sequence (SEQ ID NO: 124)

| | | | | |
|---|---|---|---|---|
| 55-56 | CDR2 | Potential Isomerization Site | DS | ES, QS, DA, DQ, DV, |
| | | | | TS, NS |
| 57-58 | CDR2 | Potential Isomerization Site | DT | ST, ET, DA, DV, QT |
| 105-106 | CDR3 | Potential Isomerization Site | DS | ES, QS, DA, DQ, DV, |
| | | | | TS, NS, GT |

TABLE A7
Engineered Variants of 5E3 Antibody

| | | | | |
|---|---|---|---|---|
| Position in 5E3 | | | | |
| VL Sequence or | | | Parent | Amino Acid |
| VH sequence | Region | Hot Spot | Amino Acid | Substitutions |

Light chain variable sequence (SEQ ID NO: 62)

| | | | | |
|---|---|---|---|---|
| 36 | FR2 | Consensus violator | F | Y |
| 46 | FR2 | Covariance violator | S | L, R,V, F |
| 61 | FR3 | Consensus violator | K | R |
| 100 | FR4 | Covariance violator | P | Q, G, R |

Heavy chain variable sequence (SEQ ID NO: 125)

| | | | | |
|---|---|---|---|---|
| 43 | FR2 | Covariance violator | L | Q, K, H |
| 76 | FR3 | Covariance violator | I | T |
| 85 | FR3 | Covariance violator | R | S, G, N, D |
| 99-100 | CDR3 | Potential Isomerization Site | DG | EG, DA, DY, DV, |
| | | | | QG, SG, TG |
| 116 | FR4 | Covariance violator | T | L, M, P, R |

TABLE A8
Engineered Variants of 24G6 Antibody

| | | | | |
|---|---|---|---|---|
| Position in 24G6 | | | | |
| VL Sequence or | | | Parent | Amino Acid |
| VH sequence | Region | Hot Spot | Amino Acid | Substitutions |

Light chain variable sequence (SEQ ID NO: 52)

| | | | | |
|---|---|---|---|---|
| 91 | FR3 | Covariance violator | F | V, I, T, L, D |

Heavy chain variable sequence (SEQ ID NO: 115)

| | | | | |
|---|---|---|---|---|
| 62-63 | CDR2 | Potential Isomerization Site | DS | ES, QS, DA, DQ, TS, |
| | | | | DV, NS |

[0188] In some embodiments, the TREM2 agonist antigen binding proteins comprise one or more CDRs of a variant of the anti-TREM2 antibodies described herein. In some embodiments, the TREM2 agonist antigen binding proteins may comprise one or more CDRs of the anti-TREM2 antibody variants set forth in TABLES A10, A11, A12, A13, and A14, below.

[0189] In certain embodiments, the TREM2 agonist antigen binding proteins of the invention comprise a light chain variable region and/or heavy chain variable region from an affinity-modulated variant of the 6E7 antibody. For instance, in some embodiments, the TREM2 agonist antigen binding proteins comprise a light chain variable region and/or a heavy chain variable region having one or more of the amino acid substitutions set forth in TABLE A9.

TABLE A9
6E7 Antibody Affinity Modulation Variants

| | | | | | | | Binding Signal | | | |
|---|---|---|---|---|---|---|---|---|---|---|
| | | | | | | | (fold over 6E7 | | | |
| | Substitutions with respect | | | | | | Parental antibody) | | | |
| | to 6E7 VH sequence | | | Substitutions with | | | 1^{st} | | | |
| | (SEQ ID NO: 124) | | | respect to 6E7 VL | | | screen | | | |
| | HC | | | (SEQ ID NO: 61) | | | 110 | 2^{nd} | 2^{nd} | 2^{nd} |
| Variant | FR1- | HC | HC | LC | LC | LC | nM or | screen | screen | screen |
| Ab ID | CDR1 | CDR2 | CDR3 | CDR1 | CDR2 | CDR3 | 10 nM^{a} | 2 nM | 10 nM | 100 nM |
| V1 | Y32S | | Q99S | | Q55T | F94Y | 1.68 | 1.29 | 1.92 | |
| V2 | Y27S | S56G | Q99S | | L54R | S93R | 2.55 | 2.23 | 2.90 | |
| V3 | T30A | G66D | Q99G | | L54R | S93R | 1.97 | 1.95 | 2.24 | |
| V4 | T30G | Y60V | Q99S | | S53R | F94Y | 6.00 | 5.88 | 5.51 | |
| V5 | | 150T | | | | F94H | 2.73 | 1.25 | 2.84 | |
| V6 | Y32M | | | | | | 0.20* | | | 0.56 |
| V7 | Y32E | | | | | | 0.11* | | | 0.32 |
| V8 | | R59K | | | | | 0.28* | | | 0.77 |
| V9 | | | T101G | | | | 0.67* | | | 0.54 |
| V10 | | | | | A50S | | 0.76* | | | 0.70 |
| V11 | | | | | | D92A | 0.79* | | | 0.42 |
| V12 | S28E | T58V | Q99G | | N56R | | 2.29 | 1.04 | 2.58 | |
| V13 | T30G | P62A | Q99G | | N56G | F94M | 1.31 | 1.15 | 1.35 | |
| V14 | T30G | S56Q | Q99G | | S53R | | 4.71 | 2.57 | 4.64 | |
| V15 | T30A | 150T | Q99S | | S53W | F94Y | 5.23 | 4.72 | 4.78 | |
| V16 | F29M | S56G | Q99S | | S53N | | 4.01 | 3.57 | 4.04 | |
| V17 | T30G | | Q99S | | L54R | F94S | 5.37 | 4.22 | 5.51 | |
| V18 | W33H | | | | | | 0.17* | | | 0.42 |
| V19 | Y32S | | | | | | 0.59* | | | 0.48 |
| V20 | | I50R | | | | | 0.18* | | | 0.52 |
| V21 | | | Y109F | | | | 0.76* | | | 0.68 |
| V22 | | | | | A50R | | 0.30* | | | 0.71 |
| V23 | | | | | | R96L | 0.40* | | | 0.40 |
| V24 | | T58V | Q99S | | N56K | R96H | 2.64 | 1.42 | 2.90 | |
| V25 | T30G | I50L | Q99S | | Q55A | F94M | 4.23 | 3.15 | 4.70 | |
| V26 | A35G | 150T | F102M, | | N56R | F94Y | 3.57 | 2.83 | 3.47 | |
| | | | Y112A | | | | | | | |
| V27 | | S61A | Q99S | | N56R | | 5.50 | 5.67 | 5.69 | |
| V28 | T30Q | I50T | Y103F | | N56S | F94L | 3.08 | 2.63 | 3.61 | |
| V29 | T30K | | | | | | 1.53 | 0.84 | 1.67 | |
| V30 | Y27S | | | | | | 0.79* | | | 0.72 |
| V31 | | D57E | | | | | 0.61* | | 0.73 | |
| V32 | | P62N | | | | | 0.82* | | | 0.89 |
| V33 | | | Y104G | | | | 0.23* | | | 0.34 |
| V34 | | | | | N56D | | 0.34* | | | 1.02 |
| V35 | | | | | | D92Y | 0.21* | | | 0.29 |
| V36 | I34L | | Q99S | | L54R | F94Y | 3.38 | 4.00 | 3.44 | |
| V37 | F29H | Q65A | Q99S | | N56W | F94Y | 3.46 | 3.69 | 3.49 | |
| V38 | T30G | T58V | | | L54R | F94H | 4.34 | 3.44 | 4.36 | |
| V39 | T30G | S61N | Q99G | | Q55V | F94S | 6.15 | 5.11 | 5.81 | |
| V40 | T30G | T58V | F110S | | N56L | S93R | 4.48 | 3.41 | 4.16 | |
| V41 | | 150T | | | | | 1.74 | 0.58 | 1.72 | |
| V42 | Y32A | | | | | | 0.45* | | | 0.41 |
| V43 | | D57G | | | | | 0.20* | | | 0.33 |
| V44 | | G54S | | | | | 0.65* | | | 0.52 |
| V45 | | | | W32F | | | 0.43* | | | 0.53 |
| V46 | | | | | S53T | | 0.83* | | | 0.96 |
| V47 | | | | | | R96M | 0.42* | | | 0.47 |
| V48 | T30G | T58V | Q99M | | N56T | F94L | 2.42 | 2.30 | 2.54 | |
| V49 | T30N | I50T, | Q99S | | L54R | F94Y | 6.51 | 5.02 | 6.58 | |
| | | Y60L | | | | | | | | |
| V50 | T30G | 150V | F110L | | L54R | F94L | 4.10 | 3.39 | 4.16 | |
| V51 | | T58V | Q99G, | | L54R | | 2.81 | 1.83 | 3.18 | |
| | | | Y112N | | | | | | | |
| V52 | T30E | | Q99G | | N56R | S93R | 3.00 | 1.78 | 3.09 | |
| V53 | | S63H | | | | | 1.25 | 0.66 | 1.17 | |
| V54 | Y32Q | | | | | | 0.55* | | | 0.54 |
| V55 | | R59I, | | | | | 0.24* | | | 0.66 |
| | | F64H | | | | | | | | |
| V56 | | S61Q | | | | | 0.23* | | | 0.59 |
| V57 | | | | R24A | | | 0.84* | | | 0.85 |
| V58 | | | | | A50K | | 0.28* | | | 0.68 |
| V59 | | | | | | Q89M | 0.19* | | | 0.60 |
| V60 | S28H | T58V | F110S | | N56R | Q89G | 3.26 | 3.35 | 3.63 | |
| V61 | T30S | S61N | Q99G | | Q55V | F94L | 5.08 | 3.63 | 5.22 | |
| V62 | T30G | S61A | D108G | | N56R | Q89G | 2.49 | 1.87 | 2.89 | |
| V63 | T30R | | Q99S | | N56R | S93R | 3.76 | 4.91 | 3.71 | |
| V64 | T30Q | | Q99G | | Q55A | F94Y | 5.41 | 4.88 | 5.48 | |
| V65 | | | Q99S | | | | 2.05 | 1.29 | 2.75 | |
| V66 | Y27T | | | | | | 0.25* | | | 0.74 |
| V67 | | I50M | | | | | 0.80* | | | 0.84 |
| V68 | | | Y103R | | | | 0.44* | | | 0.43 |
| V69 | | | | W32Y | | | 0.41* | | | 0.40 |
| V70 | | | | | S52G | | 0.79* | | | 0.84 |
| V71 | | | | | | F94E | 0.37* | | | 0.48 |
| V72 | A35G | | Q99G | | Q55V | F94Y | 3.64 | 2.50 | 4.01 | |
| V73 | T30G | S63G | Q99G | | L54R | F94Y | 5.12 | 4.17 | 5.44 | |
| V74 | T30A | T58V | Q99G | | N56L | | 3.94 | 2.54 | 4.01 | |
| V75 | | | Q99G | | N56A | F94Y | 4.64 | 3.74 | 4.52 | |
| V76 | T30G | S63E | F110S | | N56K | | 4.57 | 4.34 | 4.93 | |
| V77 | | | | | L54R | | 1.43 | 0.83 | 1.38 | |
| V78 | S28R | | | | | | 0.86* | | | 1.11 |
| V79 | | R59N | | | | | 0.70* | | | 0.52 |
| V80 | | | T101N | | | | 0.59* | | | 0.50 |
| V81 | | | | W32L | | | 0.17* | | | 0.23 |
| V82 | | | | | A51G | | 0.30* | | | 0.79 |
| V83 | | | | | | D92V | 0.20* | | | 0.29 |
| V84 | S28G | | F110S | | A50G | | 1.44 | 1.45 | 1.62 | |
| V85 | T30R | 150T | Q99S | | L54R | | 5.41 | 5.41 | 5.37 | |
| V86 | T30G, | Q65E | Q99S | | L54R | | 4.80 | 5.17 | 5.02 | |
| | I34L | | | | | | | | | |
| V87 | T30R | T58V, | Q99S | | N56W | | 3.84 | 4.86 | 3.93 | |
| | | S63D | | | | | | | | |
| V88 | T30G | | | | S53R, | F94S | 4.92 | 5.57 | 5.30 | |
| | | | | | N56R | | | | | |
| V89 | | | | | | F94H | 1.33 | 0.94 | 1.46 | |
| V90 | Y32E | | | S31R | | | 0.33* | | | 0.36 |
| V91 | | G54D | | | | | 0.25* | | | 0.61 |
| V92 | | | Y103H | | | | 0.22* | | | 0.65 |
| V93 | | | | S31G | | | 0.35* | | | 1.05 |
| V94 | | | | | S52A | | 0.31* | | | 0.87 |

[0190] Binding signal values marked with an * were obtained with the 110 nM Ab concentration, whereas the remaining values in the column were obtained with the 10 nM Ab concentration.

[0191] In some embodiments, the TREM2 agonist antigen binding protein comprises a light chain variable region comprising the sequence of SEQ ID NO:61 with a mutation at one or more amino acid positions 24, 31, 50, 52, 54, 56, 89, 92, 93, 94 and/or 96. In certain embodiments, the mutation is selected from R24A, S31R, A50S, A50G, S52G, L54R, N56K, N56R, N56L, N56T, Q89G, D92V, S93R, F94Y, F94L, R96H, R96L, or combinations thereof. In these and other embodiments, the TREM2 agonist antigen binding protein comprises a heavy chain variable region comprising the sequence of SEQ ID NO:124 with a mutation at one or more amino acid positions 27, 28, 30, 32, 50, 54, 58, 60, 61, 63, 66, 99, 101, 103, 104, and/or 110. In some embodiments, the mutation is selected from Y27S, S28G, S28H, T30N, T30G, T30E, T30A, Y32E, I50T, G54S, T58V, Y60L, S61A, S63G, S63E, G66D, Q99G, Q99S, Q99M, T101G, Y103R, Y104G, F110S, or combinations thereof. Amino acid sequences for light chain and heavy chain variable regions and associated CDRs of exemplary variants of the 6E7 antibody with improved affinity are set forth below in TABLES A7 and A8, respectively. Amino acid sequences for light chain and heavy chain variable regions and associated CDRs of exemplary variants of the 6E7 antibody with reduced affinity are set forth below in TABLES A10 and A11, respectively. The corresponding sequences for the 6E7 antibody are listed for comparison.

TABLE A10
Light Chain Variable Region Amino Acid Sequences for Improved Affinity TREM2 Antibodies

| Variant | VL | | | | |
|---|---|---|---|---|---|
| Ab ID. | Group | VL Amino Acid Sequence | CDRL1 | CDRL2 | CDRL3 |
| 6E7 | LV-16 | DIQMTQSPSSVSASVGDRVTITCRASQGIS | RASQGI | AASSLQ | QQADS |
| | | SWLAWYQQKPGKAPKLLIYAASSLQNGV | SSWLA | N | FPRT |
| | | PSRFSGSGSGTDFTLTISSLQPEDFATYFC | (SEQ ID | (SEQ ID | (SEQ ID |
| | | QQADSFPRTFGQGTKLEIK | NO:16) | NO:28) | NO:43) |
| | | (SEQ ID NO:61) | | | |
| V3 | LV-101 | DIQMTQSPSSVSASVGDRVTITCRASQGIS | RASQGI | AASSRQ | QQADR |
| | | SWLAWYQQKPGKAPKLLIYAASSRQNGV | SSWLA | N | FPRT |
| | | PSRFSGSGSGTDFTLTISSLQPEDFATYFC | (SEQ ID | (SEQ ID | (SEQ ID |
| | | QQADRFPRTFGQGTKLEIK | NO:16) | NO:143) | NO:148) |
| | | (SEQ ID NO:153) | | | |
| V24 | LV-102 | DIQMTQSPSSVSASVGDRVTITCRASQGIS | RASQGI | AASSLQ | QQADS |
| | | SWLAWYQQKPGKAPKLLIYAASSLQKGV | SSWLA | K | FPHT |
| | | PSRFSGSGSGTDFTLTISSLQPEDFATYFC | (SEQ ID | (SEQ ID | (SEQ ID |
| | | QQADSFPHTFGQGTKLEIK | NO:16) | NO:144) | NO:149) |
| | | (SEQ ID NO:154) | | | |
| V27 | LV-103 | DIQMTQSPSSVSASVGDRVTITCRASQGIS | RASQGI | AASSLQ | QQADS |
| | | SWLAWYQQKPGKAPKLLIYAASSLQRGV | SSWLA | R | FPRT |
| | | PSRFSGSGSGTDFTLTISSLQPEDFATYFC | (SEQ ID | (SEQ ID | (SEQ ID |
| | | QQADSFPRTFGQGTKLEIK | NO:16) | NO:145) | NO:43) |
| | | (SEQ ID NO:155) | | | |
| V40 | LV-104 | DIQMTQSPSSVSASVGDRVTITCRASQGIS | RASQGI | AASSLQ | QQADR |
| | | SWLAWYQQKPGKAPKLLIYAASSLQLGV | SSWLA | L | FPRT |
| | | PSRFSGSGSGTDFTLTISSLQPEDFATYFC | (SEQ ID | (SEQ ID | (SEQ ID |
| | | QQADRFPRTFGQGTKLEIK | NO:16) | NO:146) | NO:148) |
| | | (SEQ ID NO:156) | | | |
| V48 | LV-105 | DIQMTQSPSSVSASVGDRVTITCRASQGIS | RASQGI | AASSLQ | QQADS |
| | | SWLAWYQQKPGKAPKLLIYAASSLQTGV | SSWLA | T | LPRT |
| | | PSRFSGSGSGTDFTLTISSLQPEDFATYFC | (SEQ ID | (SEQ ID | (SEQ ID |
| | | QQADSLPRTFGQGTKLEIK | NO:16) | NO:26) | NO:150) |
| | | (SEQ ID NO:157) | | | |
| V49 | LV-106 | DIQMTQSPSSVSASVGDRVTITCRASQGIS | RASQGI | AASSRQ | QQADS |
| V73 | | SWLAWYQQKPGKAPKLLIYAASSRQNGV | SSWLA | N | YPRT |
| | | PSRFSGSGSGTDFTLTISSLQPEDFATYFC | (SEQ ID | (SEQ ID | (SEQ ID |
| | | QQADSYPRTFGQGTKLEIK | NO:16) | NO:143) | NO:151) |
| | | (SEQ ID NO:158) | | | |
| V52 | LV-107 | DIQMTQSPSSVSASVGDRVTITCRASQGIS | RASQGI | AASSLQ | QQADR |
| | | SWLAWYQQKPGKAPKLLIYAASSLQRGV | SSWLA | R | FPRT |
| | | PSRFSGSGSGTDFTLTISSLQPEDFATYFC | (SEQ ID | (SEQ ID | (SEQ ID |
| | | QQADRFPRTFGQGTKLEIK | NO:16) | NO:145) | NO:148) |
| | | (SEQ ID NO:159) | | | |
| V60 | LV-108 | DIQMTQSPSSVSASVGDRVTITCRASQGIS | RASQGI | AASSLQ | GQADS |
| | | SWLAWYQQKPGKAPKLLIYAASSLQRGV | SSWLA | R | FPRT |
| | | PSRFSGSGSGTDFTLTISSLQPEDFATYFC | (SEQ ID | (SEQ ID | (SEQ ID |
| | | GQADSFPRTFGQGTKLEIK | NO:16) | NO:145) | NO:152) |
| | | (SEQ ID NO:160) | | | |
| V76 | LV-109 | DIQMTQSPSSVSASVGDRVTITCRASQGIS | RASQGI | AASSLQ | QQADS |
| | | SWLAWYQQKPGKAPKLLIYAASSLQKGV | SSWLA | K | FPRT |
| | | PSRFSGSGSGRDFTLTISSLQPEDFATYFC | (SEQ ID | (SEQ ID | (SEQ ID |
| | | QQADSFPRTFGQGTKLEIK | NO:16) | NO:144) | NO:43) |
| | | (SEQ ID NO:161) | | | |
| V84 | LV-110 | DIQMTQSPSSVSASVGDRVTITCRASQGIS | RASQGI | GAS SLQ | QQADS |
| | | SWLAWYQQKPGKAPKLLIYGASSLQNGV | SSWLA | N | FPRT |
| | | PSRFSGSGSGTDFTLTISSLQPEDFATYFC | (SEQ ID | (SEQ ID | (SEQ ID |
| | | QQADSFPRTFGQGTKLEIK | NO:16) | NO:147) | NO:43) |
| | | (SEQ ID NO:162) | | | |

TABLE A11
Heavy Chain Variable Region Amino Acid Sequences for Improved Affinity TREM2 Antibodies

| | | | FR1/ | | | |
|---|---|---|---|---|---|---|
| Variant | VH | | CDRH1 | | | |
| Ab ID. | Group | VH Amino Acid Sequence | Border | CDRH1 | CDRH2 | CDRH3 |
| 6E7 | HV-15 | EVQLVQSGAEVKKPGESLKIS | YSFT | SYWIA | IIYPGDS | QRTFYY |
| | | CKGSGYSFTSYWIAWVRQMP | (SEQ ID | (SEQ ID | DTRYSP | DSSDYF |
| | | GKGLEWMGITYPGDSDTRYSP | NO:163) | NO:85) | SFQG | DY |
| | | SFQGQVTISADKSISTAYLQWS | | | (SEQ ID | (SEQ ID |
| | | SLKASDTAMYFCARQRTFYY | | | NO:91) | NO:107) |
| | | DSSDYFDYWGQGTLVTVSS | | | | |
| | | (SEQ ID NO:124) | | | | |
| V3 | HV-101 | EVQLVQSGAEVKKPGESLKIS | YSFA | SYWIA | IIYPGDS | GRTFYY |
| | | CKGSGYSFASYWIAWVRQMP | (SEQ ID | (SEQ ID | DTRYSP | DSSDYF |
| | | GKGLEWMGITYPGDSDTRYSP | NO:164) | NO:85) | SFQD | DY |
| | | SFQDQVTISADKSISTAYLQWS | | | (SEQ ID | (SEQ ID |
| | | SLKASDTAMYFCARGRTFYY | | | NO:170) | NO:176) |
| | | DSSDYFDYWGQGTLVTVSS | | | | |
| | | (SEQ ID NO:180) | | | | |
| V24 | HV-102 | EVQLVQSGAEVKKPGESLKIS | YSFT | SYWIA | IIYPGDS | SRTFYY |
| | | CKGSGYSFTSYWIAWVRQMP | (SEQ ID | (SEQ ID | DVRYSP | DSSDYF |
| | | GKGLEWMGIIYPGDSDVRYSP | NO:163) | NO:85) | SFQG | DY |
| | | SFQGQVTISADKSISTAYLQWS | | | (SEQ ID | (SEQ ID |
| | | SLKASDTAMYFCARSRTFYYD | | | NO:171) | NO:177) |
| | | SSDYFDYWGQGTLVTVSS | | | | |
| | | (SEQ ID NO:181) | | | | |
| V27 | HV-103 | EVQLVQSGAEVKKPGESLKIS | YSFT | SYWIA | IIYPGDS | SRTFYY |
| | | CKGSGYSFTSYWIAWVRQMP | (SEQ ID | (SEQ ID | DTRYAP | DSSDYF |
| | | GKGLEWMGIIYPGDSDTRYAP | NO:163) | NO:85) | SFQG | DY |
| | | SFQGQVTISADKSISTAYLQWS | | | (SEQ ID | (SEQ ID |
| | | SLKASDTAMYFCVRSRTFYYD | | | NO:172) | NO:177) |
| | | SSDYFDYWGQGTLVTVSS | | | | |
| | | (SEQ ID NO:182) | | | | |
| V40 | HV-104 | EVQLVQSGAEVKKPGESLKIS | YSFG | SYWIA | IIYPGDS | QRTFYY |
| | | CKGSGYSFGSYWIAWVRQMP | (SEQ ID | (SEQ ID | DVRYSP | DSSDYS |
| | | GKGLEWMGIIYPGDSDVRYSP | NO:165) | NO:85) | SFQG | DY |
| | | SFQGQVTISADKSISTAYLQWS | | | (SEQ ID | (SEQ ID |
| | | SLKASDTAMYFCARQRTFYY | | | NO:171) | NO:178) |
| | | DSSDYSDYWGQGTLVTVSS | | | | |
| | | (SEQ ID NO:183) | | | | |
| V48 | HV-105 | EVQLVQSGAEVKKPGESLKIS | YSFG | SYWIA | IIYPGDS | MRTFYY |
| | | CKGSGYSFGSYWIAWVRQMP | (SEQ ID | (SEQ ID | DVRYSP | DSSDYF |
| | | GKGLEWMGIIYPGDSDVRYSP | NO:165) | NO:85) | SFQG | DY |
| | | SFQGQVTISADKSISTAYLQWS | | | (SEQ ID | (SEQ ID |
| | | SLKASDTAMYFCARMRTFYY | | | NO:171) | NO:179) |
| | | DSSDYFDYWGQGTLVTVSS | | | | |
| | | (SEQ ID NO:184) | | | | |
| V49 | HV-106 | EVQLVQSGAEVKKPGESLKIS | YSFN | SYWIA | TIYPGDS | SRTFYY |
| | | CKGSGYSFNSYWIAWVRQMP | (SEQ ID | (SEQ ID | DTRLSPS | DSSDYF |
| | | GKGLEWMGTIYPGDSDTRLSP | NO:166) | NO:85) | FQG | DY |
| | | SFQGQVTISADKSISTAYLQWS | | | (SEQ ID | (SEQ ID |
| | | SLKASDTAMYFCARSRTFYYD | | | NO:173) | NO:177) |
| | | SSDYFDYWGQGTLVTVSS | | | | |
| | | (SEQ ID NO:185) | | | | |
| V52 | HV-107 | EVQLVQSGAEVKKPGESLKIS | YSFE | SYWIA | IIYPGDS | GRTFYY |
| | | CKGSGYSFESYWIAWVRQMP | (SEQ ID | (SEQ ID | DTRYSP | DSSDYF |
| | | GKGLEWMGIIYPGDSDTRYSP | NO:167) | NO:85) | SFQG | DY |
| | | SFQGQVTISADKSISTAYLQWS | | | (SEQ ID | (SEQ ID |
| | | SLKASDTAMYFCARGRTFYY | | | NO:91) | NO:176) |
| | | DSSDYFDYWGQGTLVTVSS | | | | |
| | | (SEQ ID NO:186) | | | | |
| V60 | HV-108 | EVQLVQSGAEVKKPGESLKIS | YFIFT | SYWIA | IIYPGDS | QRTFYY |
| | | CKGSGYHFTSYWIAWVRQMP | (SEQ ID | (SEQ ID | DVRYSP | DSSDYS |
| | | GKGLEWMGIIYPGDSDVRYSP | NO:168) | NO:85) | SFQG | DY |
| | | SFQGQVTISADKSISTAYLQWS | | | (SEQ ID | (SEQ ID |
| | | SLKASDTAMYFCARQRTFYY | | | NO:171) | NO:178) |
| | | DSSDYSDYWGQGTLVTVSS | | | | |
| | | (SEQ ID NO:187) | | | | |
| V73 | HV-109 | EVQLVQSGAEVKKPGESLKIS | YSFG | SYWIA | IIYPGDS | GRTFYY |
| | | CKGSGYSFGSYWIAWVRQMP | (SEQ ID | (SEQ ID | DTRYSP | DSSDYF |
| | | GKGLEWMGIIYPGDSDTRYSP | NO:165) | NO:85) | GFQG | DY |
| | | GFQGQVTISADKSISTAYLQW | | | (SEQ ID | (SEQ ID |
| | | SSLKASDTAMYFCARGRTFYY | | | NO:174) | NO:176) |
| | | DSSDYFDYWGQGTLVTVSS | | | | |
| | | (SEQ ID NO:188) | | | | |
| V76 | HV-110 | EVQLVQSGAEVKKPGESLKIS | YSFG | SYWIA | IIYPGDS | QRTFYY |
| | | CKGSGYSFGSYWIAWVRQMP | (SEQ ID | (SEQ ID | DTRYSP | DSSDYS |
| | | GKGLEWMGITYPGDSDTRYSP | NO:165) | NO:85) | EFQG | DY |
| | | EFQGQVTISADKSISTAYLQWS | | | (SEQ ID | (SEQ ID |
| | | SLKASDTAMYFCARQRTFYY | | | NO:175) | NO:178) |
| | | DSSDYSDYWGQGTLVTVSS | | | | |
| | | (SEQ ID NO:189) | | | | |
| V84 | HV-111 | EVQLVQSGAEVKKPGESLKIS | YGFT | SYWIA | IIYPGDS | QRTFYY |
| | | CKGSGYGFTSYWIAWVRQMP | (SEQ ID | (SEQ ID | DTRYSP | DSSDYS |
| | | GKGLEWMGITYPGDSDTRYSP | NO:169) | NO:85) | SFQG | DY |
| | | SFQGQVTISADKSISTAYLQWS | | | (SEQ ID | (SEQ ID |
| | | SLKASDTAMYFCARQRTFYY | | | NO:91) | NO:178) |
| | | DSSDYSDYWGQGTLVTVSS | | | | |
| | | (SEQ ID NO:190) | | | | |

[0192] In some embodiments, the TREM2 agonist antigen binding proteins of the invention may comprise one or more of the CDRs from the improved affinity variants presented in TABLE A10 (light chain CDRs; i.e. CDRLs) and TABLE All (heavy chain CDRs, i.e. CDRHs). In some embodiments, the TREM2 agonist antigen binding proteins comprise a consensus CDR sequence derived from the improved affinity variants. For instance, in some embodiments, the TREM2 agonist antigen binding proteins comprise a CDRL2 consensus sequence of X₁ASSX₂QX₃ (SEQ ID NO:139), where X1 is A or G; X₂ is L or R; and X₃ is N, K, R, L, or T. In another embodiment, the TREM2 agonist antigen binding proteins comprise a CDRL3 consensus sequence of X₁QADX₂X₃PX₄T (SEQ ID NO:140), where X₁ is Q or G; X₂ is S or R; X₃ is F, L, or Y; and X₄ is R or H. In yet another embodiment, the TREM2 agonist antigen binding proteins comprise a CDRH2 consensus sequence of X₁IYPGDSDX₂RX₃X₄PX₅FQX₆ (SEQ ID NO:141), where X₁ is I or T; X₂ is T or V; X₃ is Y or L; X₄ is S or A; X₅ is S, G, or E; and X₆ is G or D. In some embodiments, the TREM2 agonist antigen binding proteins comprise a CDRH3 consensus sequence of X₁RTFYYDSSDYX₂DY (SEQ ID NO:142), where X₁ is Q, G, S, or M; and X2 is F or S.

[0193] In some embodiments, the TREM2 agonist antigen binding proteins comprise a light chain variable region comprising complementarity determining regions CDRL1, CDRL2, and CDRL3 and a heavy chain variable region comprising complementarity determining regions CDRH1, CDRH2, and CDRH3, wherein CDRL1 comprises the sequence of SEQ ID NO:16, CDRL2 comprises the consensus sequence of SEQ ID NO:139, CDRL3 comprises the consensus sequence of SEQ ID NO:140, CDRH1 comprises the sequence of SEQ ID NO:85, CDRH2 comprises the consensus sequence of SEQ ID NO:141, and CDRH3 comprises the consensus sequence of SEQ ID NO:142.

[0194] In some embodiments, the TREM2 agonist antigen binding protein comprises a CDRL1 comprising the sequence of SEQ ID NO:16; a CDRL2 comprising a sequence selected from SEQ ID NOS:26 and 143-147; a CDRL3 comprising a sequence selected from SEQ ID NOS:43 and 148-152; a CDRH1 comprising the sequence of SEQ ID NO:85; a CDRH2 comprising a sequence selected from SEQ ID NOS:91 and 170-175; and a CDRH3 comprising a sequence selected from SEQ ID NOS:176-179.

[0195] In particular embodiments, the TREM2 agonist antigen binding proteins of the invention comprise a light chain variable region comprising a CDRL1, a CDRL2, and a CDRL3, wherein:

[0196] (a) CDRL1, CDRL2, and CDRL3 have the sequence of SEQ ID NOS:16, 143, and 148, respectively;

[0197] (b) CDRL1, CDRL2, and CDRL3 have the sequence of SEQ ID NOS:16, 144, and 149, respectively;

[0198] (c) CDRL1, CDRL2, and CDRL3 have the sequence of SEQ ID NOS:16, 145, and 43, respectively;

[0199] (d) CDRL1, CDRL2, and CDRL3 have the sequence of SEQ ID NOS:16, 146, and 148, respectively;

[0200] (e) CDRL1, CDRL2, and CDRL3 have the sequence of SEQ ID NOS:16, 26, and 150, respectively;

[0201] (f) CDRL1, CDRL2, and CDRL3 have the sequence of SEQ ID NOS:16, 143, and 151, respectively;

[0202] (g) CDRL1, CDRL2, and CDRL3 have the sequence of SEQ ID NOS:16, 145, and 148, respectively;

[0203] (h) CDRL1, CDRL2, and CDRL3 have the sequence of SEQ ID NOS:16, 145, and 152, respectively;

[0204] (i) CDRL1, CDRL2, and CDRL3 have the sequence of SEQ ID NOS:16, 144, and 43, respectively; or

[0205] (j) CDRL1, CDRL2, and CDRL3 have the sequence of SEQ ID NOS:16, 147, and 43, respectively.

[0206] In related embodiments, the TREM2 agonist antigen binding proteins of the invention comprise a heavy chain variable region comprising a CDRH1, a CDRH2, and a CDRH3, wherein: (a) CDRH1, CDRH2, and CDRH3 have the sequence of SEQ ID NOS:85, 170, and 176, respectively;

[0207] (b) CDRH1, CDRH2, and CDRH3 have the sequence of SEQ ID NOS:85, 171, and 177, respectively;

[0208] (c) CDRH1, CDRH2, and CDRH3 have the sequence of SEQ ID NOS:85, 172, and 177, respectively;

[0209] (d) CDRH1, CDRH2, and CDRH3 have the sequence of SEQ ID NOS:85, 171, and 178, respectively;

[0210] (e) CDRH1, CDRH2, and CDRH3 have the sequence of SEQ ID NOS:85, 171, and 179, respectively;

[0211] (f) CDRH1, CDRH2, and CDRH3 have the sequence of SEQ ID NOS:85, 173, and 177, respectively;

[0212] (g) CDRH1, CDRH2, and CDRH3 have the sequence of SEQ ID NOS:85, 91, and 176, respectively;

[0213] (h) CDRH1, CDRH2, and CDRH3 have the sequence of SEQ ID NOS:85, 174, and 176, respectively;

[0214] (i) CDRH1, CDRH2, and CDRH3 have the sequence of SEQ ID NOS:85, 175, and 178, respectively; or

[0215] (j) CDRH1, CDRH2, and CDRH3 have the sequence of SEQ ID NOS:85, 91, and 178, respectively.

[0216] In some embodiments, the TREM2 agonist antigen binding proteins of the invention comprise a light chain variable region comprising a CDRL1, a CDRL2, and a CDRL3 and a heavy chain variable region comprising a CDRH1, a CDRH2, and a CDRH3, wherein:

[0217] (a) CDRL1, CDRL2, and CDRL3 have the sequence of SEQ ID NOS:16, 143, and 148, respectively, and CDRH1, CDRH2, and CDRH3 have the sequence of SEQ ID NOS:85, 170, and 176, respectively;

[0218] (b) CDRL1, CDRL2, and CDRL3 have the sequence of SEQ ID NOS:16, 144, and 149, respectively, and CDRH1, CDRH2, and CDRH3 have the sequence of SEQ ID NOS:85, 171, and 177, respectively;

[0219] (c) CDRL1, CDRL2, and CDRL3 have the sequence of SEQ ID NOS:16, 145, and 43, respectively, and CDRH1, CDRH2, and CDRH3 have the sequence of SEQ ID NOS:85, 172, and 177, respectively;

[0220] (d) CDRL1, CDRL2, and CDRL3 have the sequence of SEQ ID NOS:16, 146, and 148, respectively, and CDRH1, CDRH2, and CDRH3 have the sequence of SEQ ID NOS:85, 171, and 178, respectively;

[0221] (e) CDRL1, CDRL2, and CDRL3 have the sequence of SEQ ID NOS:16, 26, and 150, respectively, and CDRH1, CDRH2, and CDRH3 have the sequence of SEQ ID NOS:85, 171, and 179, respectively;

[0222] (f) CDRL1, CDRL2, and CDRL3 have the sequence of SEQ ID NOS:16, 143, and 151, respectively, and CDRH1, CDRH2, and CDRH3 have the sequence of SEQ ID NOS:85, 173, and 177, respectively;

[0223] (g) CDRL1, CDRL2, and CDRL3 have the sequence of SEQ ID NOS:16, 145, and 148, respectively, and CDRH1, CDRH2, and CDRH3 have the sequence of SEQ ID NOS:85, 91, and 176, respectively;

[0224] (h) CDRL1, CDRL2, and CDRL3 have the sequence of SEQ ID NOS:16, 145, and 152, respectively, and CDRH1, CDRH2, and CDRH3 have the sequence of SEQ ID NOS:85, 171, and 178, respectively;

[0225] (i) CDRL1, CDRL2, and CDRL3 have the sequence of SEQ ID NOS:16, 143, and 151, respectively, and CDRH1, CDRH2, and CDRH3 have the sequence of SEQ ID NOS:85, 174, and 176, respectively;

[0226] (j) CDRL1, CDRL2, and CDRL3 have the sequence of SEQ ID NOS:16, 144, and 43, respectively, and CDRH1, CDRH2, and CDRH3 have the sequence of SEQ ID NOS:85, 175, and 178, respectively; or

[0227] (k) CDRL1, CDRL2, and CDRL3 have the sequence of SEQ ID NOS:16, 147, and 43, respectively, and CDRH1, CDRH2, and CDRH3 have the sequence of SEQ ID NOS:85, 91, and 178, respectively.

[0228] In some embodiments, the TREM2 agonist antigen binding proteins of the invention may comprise a light chain variable region selected from LV-101, LV-102, LV-103, LV-104, LV-105, LV-106, LV-107, LV-108, LV-109, and LV-110, as shown in TABLE A10, and/or a heavy chain variable region selected from HV-101, HV-102, HV-103, HV-104, HV-105, HV-106, HV-107, HV-108, HV-109, HV-110, and HV-111, as shown in TABLE All, or sequences that are at least 80% identical, at least 85% identical, at least 90% identical, or at least 95% identical to any of the sequences in TABLE A10 and A11. For instance, in some embodiments, the TREM2 agonist antigen binding proteins comprise a light chain variable region comprising (i) a sequence that is at least 90% identical to a sequence selected from SEQ ID NOS:153-162, (ii) a sequence that is at least 95% identical to a sequence selected from SEQ ID NOS:153-162, or (iii) a sequence selected from SEQ ID NOS:153-162. In related embodiments, the TREM2 agonist antigen binding proteins comprise a heavy chain variable region comprising (i) a sequence that is at least 90% identical to a sequence selected from SEQ ID NOS:180-190, (ii) a sequence that is at least 95% identical to a sequence selected from SEQ ID NOS:180-190, or (iii) a sequence selected from SEQ ID NOS:180-190.

[0229] Each of the light chain variable regions listed in TABLE A10 may be combined with any of the heavy chain variable regions listed in TABLE All to form an anti-TREM2 binding domain of the antigen binding proteins of the invention. Examples of such combinations include, but are not limited to: LV-101 (SEQ ID NO:153) and HV-101 (SEQ ID NO:180); LV-102 (SEQ ID NO:154) and HV-102 (SEQ ID NO:181); LV-103 (SEQ ID NO:155) and HV-103 (SEQ ID NO:182); LV-104 (SEQ ID NO:156) and HV-104 (SEQ ID NO:183); LV-105 (SEQ ID NO:157) and HV-105 (SEQ ID NO:184); LV-106 (SEQ ID NO:158) and HV-106 (SEQ ID NO:185); LV-107 (SEQ ID NO:159) and HV-107 (SEQ ID NO:186); LV-108 (SEQ ID NO:160) and HV-108 (SEQ ID NO:187); LV-106 (SEQ ID NO:158) and HV-109 (SEQ ID NO:188); LV-109 (SEQ ID NO:161) and HV-110 (SEQ ID NO:189); and LV-110 (SEQ ID NO:162) and HV-111 (SEQ ID NO:190).

TABLE A12
Light Chain Variable Region Amino Acid Sequences for Reduced Affinity TREM2 Antibodies

| Variant | VL | | | | |
|---|---|---|---|---|---|
| Ab ID. | Group | VL Amino Acid Sequence | CDRL1 | CDRL2 | CDRL3 |
| 6E7 | LV-16 | DIQMTQSPSSVSASVGDRVTITCRASQGI | RASQGI | AASSLQ | QQADS |
| | | SSWLAWYQQKPGKAPKLLIYAASSLQN | SSWLA | N | FPRT |
| | | GVPSRFSGSGSGTDFTLTISSLQPEDFATY | (SEQ ID | (SEQ ID | (SEQ ID |
| | | FCQQADSFPRTFGQGTKLEIK | NO:16) | NO:28) | NO:43) |
| | | (SEQ ID NO:61) | | | |
| V9 | LV-16 | DIQMTQSPSSVSASVGDRVTITCRASQGI | RASQGI | AASSLQ | QQADS |
| V30 | | SSWLAWYQQKPGKAPKLLIYAASSLQN | SSWLA | N | FPRT |
| V33 | | GVPSRFSGSGSGTDFTLTISSLQPEDFATY | (SEQ ID | (SEQ ID | (SEQ ID |
| V44 | | FCQQADSFPRTFGQGTKLEIK | NO:16) | NO:28) | NO:43) |
| V68 | | (SEQ ID NO:61) | | | |
| V10 | LV-201 | DIQMTQSPSSVSASVGDRVTITCRASQGI | RASQGI | SASSLQ | QQADS |
| | | SSWLAWYQQKPGKAPKLLIYSASSLQN | SSWLA | N | FPRT |
| | | GVPSRFSGSGSGTDFTLTISSLQPEDFATY | (SEQ ID | (SEQ ID | (SEQ ID |
| | | FCQQADSFPRTFGQGTKLEIK | NO:16) | NO:292) | NO:43) |
| | | (SEQ ID NO:295) | | | |
| V23 | LV-202 | DIQMTQSPSSVSASVGDRVTITCRASQGI | RASQGI | AASSLQ | QQADS |
| | | SSWLAWYQQKPGKAPKLLIYAASSLQN | SSWLA | N | FPLT |
| | | GVPSRFSGSGSGTDFTLTISSLQPEDFATY | (SEQ ID | (SEQ ID | (SEQ ID |
| | | FCQQADSFPLTFGQGTKLEIK | NO:16) | NO:28) | NO:294) |
| | | (SEQ ID NO:296) | | | |
| V57 | LV-203 | DIQMTQSPSSVSASVGDRVTITCAASQGI | AASQGI | AASSLQ | QQADS |
| | | SSWLAWYQQKPGKAPKLLIYAASSLQN | SSWLA | N | FPRT |
| | | GVPSRFSGSGSGTDFTLTISSLQPEDFATY | (SEQ ID | (SEQ ID | (SEQ ID |
| | | FCQQADSFPRTFGQGTKLEIK | NO:290) | NO:28) | NO:43) |
| | | (SEQ ID NO:297) | | | |
| V70 | LV-204 | DIQMTQSPSSVSASVGDRVTITCRASQGI | RASQGI | AAGSL | QQADS |
| | | SSWLAWYQQKPGKAPKLLIYAAGSLQN | SSWLA | QN | FPRT |
| | | GVPSRFSGSGSGTDFTLTISSLQPEDFATY | (SEQ ID | (SEQ ID | (SEQ ID |
| | | FCQQADSFPRTFGQGTKLEIK | NO:16) | NO:293) | NO:43) |
| | | (SEQ ID NO:298) | | | |
| V83 | LV-205 | DIQMTQSPSSVSASVGDRVTITCRASQGI | RASQGI | AASSLQ | QQAVS |
| | | SSWLAWYQQKPGKAPKLLIYAASSLQN | SSWLA | N | FPRT |
| | | GVPSRFSGSGSGTDFTLTISSLQPEDFATY | (SEQ ID | (SEQ ID | (SEQ ID |
| | | FCQQAVSFPRTFGQGTKLEIK | NO:16) | NO:28) | NO:271) |
| | | (SEQ ID NO:299) | | | |
| V90 | LV-206 | DIQMTQSPSSVSASVGDRVTITCRASQGI | RASQGI | AASSLQ | QQADS |
| | | SRWLAWYQQKPGKAPKLLIYAASSLQN | SRWLA | N | FPRT |
| | | GVPSRFSGSGSGTDFTLTISSLQPEDFATY | (SEQ ID | (SEQ ID | (SEQ ID |
| | | FCQQADSFPRTFGQGTKLEIK | NO:291) | NO:28) | NO:43) |
| | | (SEQ ID NO:300) | | | |

TABLE A13
Heavy Chain Variable Region Amino Acid Sequences for Reduced Affinity TREM2 Antibodies

| Variant | VH | | FR1/CDRH1 | | | |
|---|---|---|---|---|---|---|
| Ab ID. | Group | VH Amino Acid Sequence | border | CDRH1 | CDRH2 | CDRH3 |
| 6E7 | HV-15 | EVQLVQSGAEVKKPGESLKISCK | YSFT | SYWIA | IIYPGD | QRTFYY |
| | | GSGYSFTSYWIAWVRQMPGKG | (SEQ ID | (SEQ ID | SDTRYS | DSSDYF |
| | | LEWMGIIYPGDSDTRYSPSFQGQ | NO:163) | NO:85) | PSFQG | DY |
| | | VTISADKSISTAYLQWSSLKASD | | | (SEQ ID | (SEQ ID |
| | | TAMYFCARQRTFYYDSSDYFDY | | | NO:91) | NO:107) |
| | | WGQGTLVTVSS | | | | |
| | | (SEQ ID NO:124) | | | | |
| V9 | HV- | EVQLVQSGAEVKKPGESLKISCK | YSFT | SYWIA | IIYPGD | QRGFYY |
| | 201 | GSGYSFTSYWIAWVRQMPGKG | (SEQ ID | (SEQ ID | SDTRYS | DSSDYF |
| | | LEWMGIIYPGDSDTRYSPSFQGQ | NO:163) | NO:85) | PSFQG | DY |
| | | VTISADKSISTAYLQWSSLKASD | | | (SEQ ID | (SEQ ID |
| | | TAMYFCARQRGFYYDSSDYFDY | | | NO:91) | NO:304) |
| | | WGQGTLVTVSS | | | | |
| | | (SEQ ID NO:307) | | | | |
| V10 | HV-15 | EVQLVQSGAEVKKPGESLKISCK | YSFT | SYWIA | IIYPGD | QRTFYY |
| V23 | | GSGYSFTSYWIAWVRQMPGKG | (SEQ ID | (SEQ ID | SDTRYS | DSSDYF |
| V57 | | LEWMGIIYPGDSDTRYSPSFQGQ | NO:163) | NO:85) | PSFQG | DY |
| V70 | | VTISADKSISTAYLQWSSLKASD | | | (SEQ ID | (SEQ ID |
| V83 | | TAMYFCARQRTFYYDSSDYFDY | | | NO:91) | NO:107) |
| | | WGQGTLVTVSS | | | | |
| | | (SEQ ID NO:124) | | | | |
| V30 | HV- | EVQLVQSGAEVKKPGESLKISCK | SSFT | SYWIA | IIYPGD | QRTFYY |
| | 202 | GSGSSFTSYWIAWVRQMPGKGL | (SEQ ID | (SEQ ID | SDTRYS | DSSDYF |
| | | EWMGIIYPGDSDTRYSPSFQGQV | NO:301) | NO:85) | PSFQG | DY |
| | | TISADKSISTAYLQWSSLKASDT | | | (SEQ ID | (SEQ ID |
| | | AMYFCARQRTFYYDSSDYFDY | | | NO:91) | NO:107) |
| | | WGQGTLVTVSS | | | | |
| | | (SEQ ID NO:308) | | | | |
| V33 | HV- | EVQLVQSGAEVKKPGESLKISCK | YSFT | SYWIA | IIYPGD | QRTFYG |
| | 203 | GSGYSFTSYWIAWVRQMPGKG | (SEQ ID | (SEQ ID | SDTRYS | DSSDYF |
| | | LEWMGIIYPGDSDTRYSPSFQGQ | NO:163) | NO:85) | PSFQG | DY |
| | | VTISADKSISTAYLQWSSLKASD | | | (SEQ ID | (SEQ ID |
| | | TAMYFCARQRTFYGDSSDYFDY | | | NO:91) | NO:305) |
| | | WGQGTLVTVSS | | | | |
| | | (SEQ ID NO:309) | | | | |
| V44 | HV- | EVQLVQSGAEVKKPGESLKISCK | YSFT | SYWIA | IIYPSDS | QRTFYY |
| | 204 | GSGYSFTSYWIAWVRQMPGKG | (SEQ ID | (SEQ ID | DTRYSP | DSSDYF |
| | | LEWMGIIYPSDSDTRYSPSFQGQ | NO:163) | NO:85) | SFQG | DY |
| | | VTISADKSISTAYLQWSSLKASD | | | (SEQ ID | (SEQ ID |
| | | TAMYFCARQRTFYYDSSDYFDY | | | NO:303) | NO:107) |
| | | WGQGTLVTVSS | | | | |
| | | (SEQ ID NO:310) | | | | |
| V68 | HV- | EVQLVQSGAEVKKPGESLKISCK | YSFT | SYWIA | IIYPGD | QRTFRY |
| | 205 | GSGYSFTSYWIAWVRQMPGKG | (SEQ ID | (SEQ ID | SDTRYS | DSSDYF |
| | | LEWMGIIYPGDSDTRYSPSFQGQ | NO:163) | NO:85) | PSFQG | DY |
| | | VTISADKSISTAYLQWSSLKASD | | | (SEQ ID | (SEQ ID |
| | | TAMYFCARQRTFRYDSSDYFDY | | | NO:91) | NO:306) |
| | | WGQGTLVTVSS | | | | |
| | | (SEQ ID NO:311) | | | | |
| V90 | HV- | EVQLVQSGAEVKKPGESLKISCK | YSFT | SEWIA | IIYPGD | QRTFYY |
| | 206 | GSGYSFTSEWIAWVRQMPGKGL | (SEQ ID | (SEQ ID | SDTRYS | DSSDYF |
| | | EWMGIIYPGDSDTRYSPSFQGQV | NO:163) | NO:302) | PSFQG | DY |
| | | TISADKSISTAYLQWSSLKASDT | | | (SEQ ID | (SEQ ID |
| | | AMYFCARQRTFYYDSSDYFDY | | | NO:91) | NO:107) |
| | | WGQGTLVTVSS | | | | |
| | | (SEQ ID NO:312) | | | | |

[0230] In some embodiments, the TREM2 agonist antigen binding proteins of the invention may comprise one or more of the CDRs from the reduced affinity variants presented in TABLE A12 (light chain CDRs; i.e. CDRLs) and TABLE A13 (heavy chain CDRs, i.e. CDRHs). In some embodiments, the TREM2 agonist antigen binding proteins comprise a consensus CDR sequence derived from the reduced affinity variants. For instance, in one embodiment, the TREM2 agonist antigen binding proteins comprise a CDRL1 consensus sequence of X₁ASQGISX₂WLA (SEQ ID NO:284), where X₁ is R or A; and X₂ is S or R. In another embodiment, the TREM2 agonist antigen binding proteins comprise a CDRL2 consensus sequence of X₁AX₂SLQN (SEQ ID NO:285), where X₁ is A or S; and X₂ is S or G. In another embodiment, the TREM2 agonist antigen binding proteins comprise a CDRL3 consensus sequence of QQAX₁SFPX₂T (SEQ ID NO:286), where X₁ is D or V; and X2 is R or L. In another embodiment, the TREM2 agonist antigen binding proteins comprise a CDRH1 consensus sequence of SX₁WIA (SEQ ID NO:287), where X₁ is Y or E. In yet another embodiment, the TREM2 agonist antigen binding proteins comprise a CDRH2 consensus sequence of IIYPX₁DSDTRYSPSFQG (SEQ ID NO:288), where X₁ is G or S. In still another embodiment, the TREM2 agonist antigen binding proteins comprise a CDRH3 consensus sequence of QRX₁FX₂X₃DSSDYFDY (SEQ ID NO:289), where X1 is T or G; X₂ is Y or R; and X₃ is Y or G. In some embodiments, the TREM2 agonist antigen binding proteins comprise a light chain variable region comprising complementarity determining regions CDRL1, CDRL2, and CDRL3 and a heavy chain variable region comprising complementarity determining regions CDRH1, CDRH2, and CDRH3, wherein CDRL1 comprises the sequence of SEQ ID NO:284, CDRL2 comprises the consensus sequence of SEQ ID NO:285, CDRL3 comprises the consensus sequence of SEQ ID NO:286, CDRH1 comprises the sequence of SEQ ID NO:287, CDRH2 comprises the consensus sequence of SEQ ID NO:288, and CDRH3 comprises the consensus sequence of SEQ ID NO:289.

[0231] In some embodiments, the TREM2 agonist antigen binding proteins of the invention comprise a CDRL1 comprising a sequence selected from SEQ ID NOS:16, 290, and 291; a CDRL2 comprising a sequence selected from SEQ ID NOS:28, 292, and 293; a CDRL3 comprising a sequence selected from SEQ ID NOS:43, 294, and 271; a CDRH1 comprising the sequence of SEQ ID NO:85 or SEQ ID NO:302; a CDRH2 comprising the sequence of SEQ ID NO:91 or SEQ ID NO:303; and a CDRH3 comprising a sequence selected from SEQ ID NOS:107 and 304-306.

[0232] In some embodiments, the TREM2 agonist antigen binding proteins of the invention comprise a light chain variable region comprising a CDRL1, a CDRL2, and a CDRL3, wherein: (a) CDRL1, CDRL2, and CDRL3 have the sequence of SEQ ID NOS:16, 28, and 43, respectively;

[0233] (b) CDRL1, CDRL2, and CDRL3 have the sequence of SEQ ID NOS:16, 292, and 43, respectively;

[0234] (c) CDRL1, CDRL2, and CDRL3 have the sequence of SEQ ID NOS:16, 28, and 294, respectively;

[0235] (d) CDRL1, CDRL2, and CDRL3 have the sequence of SEQ ID NOS:290, 28, and 43, respectively;

[0236] (e) CDRL1, CDRL2, and CDRL3 have the sequence of SEQ ID NOS:16, 293, and 43, respectively;

[0237] (f) CDRL1, CDRL2, and CDRL3 have the sequence of SEQ ID NOS:16, 28, and 271, respectively; or

[0238] (g) CDRL1, CDRL2, and CDRL3 have the sequence of SEQ ID NOS:291, 28, and 43, respectively.

[0239] In related embodiments, the TREM2 agonist antigen binding proteins of the invention comprise a heavy chain variable region comprising a CDRH1, a CDRH2, and a CDRH3, wherein:

[0240] (a) CDRH1, CDRH2, and CDRH3 have the sequence of SEQ ID NOS:85, 91, and 304, respectively;

[0241] (b) CDRH1, CDRH2, and CDRH3 have the sequence of SEQ ID NOS:85, 91, and 107, respectively;

[0242] (c) CDRH1, CDRH2, and CDRH3 have the sequence of SEQ ID NOS:85, 91, and 305, respectively;

[0243] (d) CDRH1, CDRH2, and CDRH3 have the sequence of SEQ ID NOS:85, 303, and 107, respectively;

[0244] (e) CDRH1, CDRH2, and CDRH3 have the sequence of SEQ ID NOS:85, 91, and 306, respectively; or

[0245] (f) CDRH1, CDRH2, and CDRH3 have the sequence of SEQ ID NOS:302, 91, and 107, respectively.

[0246] In some embodiments, the TREM2 agonist antigen binding proteins of the invention comprise a light chain variable region comprising a CDRL1, a CDRL2, and a CDRL3 and a heavy chain variable region comprising a CDRH1, a CDRH2, and a CDRH3, wherein:

[0247] (a) CDRL1, CDRL2, and CDRL3 have the sequence of SEQ ID NOS:16, 28, and 43, respectively, and CDRH1, CDRH2, and CDRH3 have the sequence of SEQ ID NOS:85, 91, and 304, respectively;

[0248] (b) CDRL1, CDRL2, and CDRL3 have the sequence of SEQ ID NOS:16, 292, and 43, respectively, and CDRH1, CDRH2, and CDRH3 have the sequence of SEQ ID NOS:85, 91, and 107, respectively;

[0249] (c) CDRL1, CDRL2, and CDRL3 have the sequence of SEQ ID NOS:16, 28, and 294, respectively, and CDRH1, CDRH2, and CDRH3 have the sequence of SEQ ID NOS:85, 91, and 107, respectively;

[0250] (d) CDRL1, CDRL2, and CDRL3 have the sequence of SEQ ID NOS:16, 28, and 43, respectively, and CDRH1, CDRH2, and CDRH3 have the sequence of SEQ ID NOS:85, 91, and 107, respectively;

[0251] (e) CDRL1, CDRL2, and CDRL3 have the sequence of SEQ ID NOS:16, 28, and 43, respectively, and CDRH1, CDRH2, and CDRH3 have the sequence of SEQ ID NOS:85, 91, and 305, respectively;

[0252] (f) CDRL1, CDRL2, and CDRL3 have the sequence of SEQ ID NOS:16, 28, and 43, respectively, and CDRH1, CDRH2, and CDRH3 have the sequence of SEQ ID NOS:85, 303, and 107, respectively;

[0253] (g) CDRL1, CDRL2, and CDRL3 have the sequence of SEQ ID NOS:290, 28, and 43, respectively, and CDRH1, CDRH2, and CDRH3 have the sequence of SEQ ID NOS:85, 91, and 107, respectively;

[0254] (h) CDRL1, CDRL2, and CDRL3 have the sequence of SEQ ID NOS:16, 28, and 43, respectively, and CDRH1, CDRH2, and CDRH3 have the sequence of SEQ ID NOS:85, 91, and 306, respectively;

[0255] (i) CDRL1, CDRL2, and CDRL3 have the sequence of SEQ ID NOS:16, 293, and 43, respectively, and CDRH1, CDRH2, and CDRH3 have the sequence of SEQ ID NOS:85, 91, and 107, respectively;

[0256] (j) CDRL1, CDRL2, and CDRL3 have the sequence of SEQ ID NOS:16, 28, and 271, respectively, and CDRH1, CDRH2, and CDRH3 have the sequence of SEQ ID NOS:85, 91, and 107, respectively; or

[0257] (k) CDRL1, CDRL2, and CDRL3 have the sequence of SEQ ID NOS:291, 28, and 43, respectively, and CDRH1, CDRH2, and CDRH3 have the sequence of SEQ ID NOS:302, 91, and 107, respectively.

[0258] In some embodiments, the TREM2 agonist antigen binding proteins of the invention may comprise a light chain variable region selected from LV-16, LV-201, LV-202, LV-203, LV-204, LV-205, and LV-206, as shown in TABLE A12, and/or a heavy chain variable region selected from HV-15, HV-201, HV-202, HV-203, HV-204, HV-205, and HV-206, as shown in TABLE A13, or sequences that are at least 80% identical, at least 85% identical, at least 90% identical, or at least 95% identical to any of the sequences in TABLES A12 and A13. For instance, in certain embodiments, the TREM2 agonist antigen binding proteins comprise a light chain variable region comprising (i) a sequence that is at least 90% identical to a sequence selected from SEQ ID NOS:61 and 295-300, (ii) a sequence that is at least 95% identical to a sequence selected from SEQ ID NOS:61 and 295-300, or (iii) a sequence selected from SEQ ID NOS:61 and 295-300. In related embodiments, the TREM2 agonist antigen binding proteins comprise a heavy chain variable region comprising (i) a sequence that is at least 90% identical to a sequence selected from SEQ ID NOS:124 and 307-312, (ii) a sequence that is at least 95% identical to a sequence selected from SEQ ID NOS:124 and 307-312, or (iii) a sequence selected from SEQ ID NOS:124 and 307-312.

[0259] In some embodiments, each of the light chain variable regions listed in TABLE A12 may be combined with any of the heavy chain variable regions listed in TABLE A13 to form an anti-TREM2 binding domain of the antigen binding proteins of the invention. Examples of such combinations include, but are not limited to: LV-16 (SEQ ID NO:61) and HV-201 (SEQ ID NO:307); LV-201 (SEQ ID NO:295) and HV-15 (SEQ ID NO:124); LV-202 (SEQ ID NO:296) and HV-15 (SEQ ID NO:124); LV-16 (SEQ ID NO:61) and HV-202 (SEQ ID NO:308); LV-16 (SEQ ID NO:61) and HV-203 (SEQ ID NO:309); LV-16 (SEQ ID NO:61) and HV-204 (SEQ ID NO:310); LV-203 (SEQ ID NO:297) and HV-15 (SEQ ID NO:124); LV-16 (SEQ ID NO:61) and HV-205 (SEQ ID NO:311); LV-204 (SEQ ID NO:298) and HV-15 (SEQ ID NO:124); LV-205 (SEQ ID NO:299) and HV-15 (SEQ ID NO:124); and LV-206 (SEQ ID NO:300) and HV-206 (SEQ ID NO:312).

[0260] In some embodiments, the TREM2 agonist antigen binding proteins comprise one or more CDRS of the anti-TREM2 antibody variants set forth in TABLE A14. In some embodiments, the TREM2 agonist antigen binding proteins comprise the light chain variable region and heavy chain variable region of the anti-TREM2 antibody variants set forth in TABLE A14.

TABLE A14
Exemplary Variable Region Amino Acid Sequences of Engineered Antibodies

| Ab ID. | LC variable region | CDRL1 | CDRL2 | CDRL3 |
|---|---|---|---|---|
| 24G6 | DIVMTQSPDSLAVSLGERATINCKSSQSVLY | KSSQSV | WASTR | QQYYS |
| (SST28347 | SSNNKHFLAWYQQKPGQPPKLLIYWASTRLYSSN | LYSSNN | ES | TPLT |
| and | ESGVPDRFSGSGSGTDFTLTISSLQAEDVAV | KHFLA | (SEQ ID | (SEQ ID |
| SST204812) | YYCQQYYSTPLTFGGGTKVEIK | NO: 8) | NO: 22) | NO: 35) |
| | (SEQ ID NO: 326) | | | |
| 6E7 | DIQMTQSPSSVSASVGDRVTITCRASQGISS | RASQGI | AASSLQ | QQADA |
| (SST29857) | WLAWYQQKPGKAPKLLIYAASSLQSGVPS | SSWLA | S | FPRT |
| | RFSGSGSGTDFTLTISSLQPEDFATYFCQQA | (SEQ ID | (SEQ ID | (SEQ ID |
| | DAFPRTFGQGTKLEIK (SEQ ID NO: 328) | NO: 16) | NO: 369) | NO: 370) |
| 13E7 | EIVMTQSPATLSVSPGERATLSCRASQSVSS | RASQS | GASTR | LQDNN |
| (SST202443) | NLAWFQQKPGQAPRLLIYGASTRATGIPAR | VSSNLA | AT | FPPT |
| | FSGSGSGTEFTLTISSLQPEDFAVYYCLQDN | (SEQ ID | (SEQ ID | (SEQ ID |
| | NFPPTFGQGTKVDIK (SEQ ID NO: 330) | NO: 10) | NO: 23) | NO: 372) |
| 5E3 | DIQMTQSPSSLSASVGDRVTITCRASQGISN | RASQGI | AASSLQ | QQYST |
| (SST29825) | YLAWYQQKPGKAPKSLIYAASSLQSGVPSR | SNYLA | S | YPFT |
| | FSGSGSGTDFTLTISSLQPEDFATYYCQQYS | (SEQ ID | (SEQ ID | (SEQ ID |
| | TYPFTFGQGTKVDIK (SEQ ID NO: 332) | NO: 17) | NO: 29) | NO: 44) |
| Ab ID. | HC variable region | CDRH1 | CDRH2 | CDRH3 |
| 24G6 | EVQLLESGGGLVQPGGSLRLSCAASGFTFS | SYAMS | AISGSG | AYTPM |
| (SST28347 | SYAMSWVRQAPGKGLEWVSAISGSGGSTY | (SEQ ID | GSTYY | AFFDY |
| and | YAESVKGRFTISRDNSKNTLYLQMNSLRAE | NO: 77) | AESVK | (SEQ ID |
| SST204812) | DTAVYYCAKAYTPMAFFDYWGQGTLVTV | | G | NO: 98) |
| | SS (SEQ ID NO: 327) | | (SEQ ID | |
| | | | NO: 368) | |
| 6E7 | EVQLVQSGAEVKKPGESLKISCKGSGYSFT | SYWIA | IIYPGD | QRTFY |
| (SST29857) | SYWIAWVRQMPGKGLEWMGITYPGDADA | (SEQ ID | ADARY | YDSSD |
| | RYSPSFQGQVTISADKSISTAYLQWSSLKAS | NO: 85) | SPSFQG | YFDY |
| | DTAMYFCARQRTFYYDSSDYFDYWGQGT | | (SEQ ID | (SEQ ID |
| | LVTVSS (SEQ ID NO: 329) | | NO: 371) | NO: 107) |
| 13E7 | EVQLVQSGAEVKKPGESLKISCKGSGYSFT | SWIG | IIYPGD | RRQGIF |
| (SST202443) | SYWIGWVRQMPGKGLEWMGITYPGDADA | (SEQ ID | ADARY | GDALD |
| | RYSPSFQGQVTISADKSISTAYLQWSSLKAS | NO: 81) | SPSFQG | F |
| | DTAMYFCARRRQGIFGDALDFWGQGTLVT | | (SEQ ID | (SEQ ID |
| | VSS (SEQ ID NO: 331) | | NO: 373) | NO: 374) |
| | QVQLVQSGAEVKKPGASVKVSCKASGYTF | GYYIH | WINPYS | DAGYL |
| | TGYYIHWVRQAPGQGLEWMGWINPYSGG | (SEQ ID | GGTTS | ALYGT |
| | TTSAQKFQGRVTMTRDTSTSSAYMELSRLR | NO: 86) | AQKFQ | DV |
| | SDDTAVYYCARDAGYLALYGTDVWGQGT | | G | (SEQ ID |
| | LVTVSS (SEQ ID NO: 333) | | (SEQ ID | NO: 375 |
| | | | NO: 94 | |

[0261] In some embodiments, the TREM2 agonist antigen binding protein comprises a light chain variable region comprising a CDRL1, a CDRL2, and a CDRL3, wherein:

[0262] (a) CDRL1, CDRL2, and CDRL3 have the sequence of SEQ ID NOS:16, 369, and 370, respectively;

[0263] (b) CDRL1, CDRL2, and CDRL3 have the sequence of SEQ ID NOS:10, 23, and 372, respectively; or

[0264] (c) CDRL1, CDRL2, and CDRL3 have the sequence of SEQ ID NOS:6, 21, and 33, respectively;

[0265] (d) CDRL1, CDRL2, and CDRL3 have the sequence of SEQ ID NOS:6, 20, and 33, respectively.

[0266] In some embodiments, the TREM2 agonist antigen binding protein comprises a heavy chain variable region comprising a CDRH1, a CDRH2, and a CDRH3, wherein:

[0267] (a) CDRH1, CDRH2, and CDRH3 have the sequence of SEQ ID NOS:77, 368, and 98, respectively;

[0268] (b) CDRH1, CDRH2, and CDRH3 have the sequence of SEQ ID NOS:85, 371, and 107, respectively;

[0269] (c) CDRH1, CDRH2, and CDRH3 have the sequence of SEQ ID NOS:81, 373, and 374, respectively; or

[0270] (d) CDRH1, CDRH2, and CDRH3 have the sequence of SEQ ID NOS:86, 94, and 375, respectively.

[0271] In some embodiments, the TREM2 agonist antigen binding protein comprises a light chain variable region comprising a CDRL1, a CDRL2, and a CDRL3 and a heavy chain variable region comprising a CDRH1, a CDRH2, and a CDRH3, wherein:

[0272] (a) CDRL1, CDRL2, and CDRL3 have the sequence of SEQ ID NOS:8, 22, and 35, respectively, and CDRH1, CDRH2, and CDRH3 have the sequence of SEQ ID NOS:77, 368, and 98, respectively;

[0273] (b) CDRL1, CDRL2, and CDRL3 have the sequence of SEQ ID NOS:16, 369, and 370, respectively, and CDRH1, CDRH2, and CDRH3 have the sequence of SEQ ID NOS:85, 371, and 107, respectively;

[0274] (c) CDRL1, CDRL2, and CDRL3 have the sequence of SEQ ID NOS:10, 23, and 372, respectively, and CDRH1, CDRH2, and CDRH3 have the sequence of SEQ ID NOS:81, 373, and 374, respectively; or

[0275] (d) CDRL1, CDRL2, and CDRL3 have the sequence of SEQ ID NOS:17, 29, and 44, respectively, and CDRH1, CDRH2, and CDRH3 have the sequence of SEQ ID NOS:86, 94, and 375, respectively.

[0276] Accordingly, in some embodiments, the TREM2 agonist antigen binding protein comprises a light chain variable region comprising a CDRL1, a CDRL2, and a CDRL3, and a heavy chain variable region comprising a CDRH1, a CDRH2, and a CDRH3, wherein the CDRL1, CDRL2, and CDRL3 have the sequence of SEQ ID NOS:10, 23, and 372, respectively, and the CDRH1, CDRH2, and CDRH3 have the sequence of SEQ ID NOS:81, 373, and 374, respectively.

[0277] In some embodiments therefore, the present invention provides a method of treating ALSP in a human patient, the method comprising administering to the patient an effective amount of a TREM2 agonist antigen binding protein comprising a CDRL1, CDRL2, and CDRL3 having the sequence of SEQ ID NOS:10, 23, and 372, respectively, and a CDRH1, CDRH2, and CDRH3 having the sequence of SEQ ID NOS:81, 373, and 374, respectively. In certain embodiments, the antibody is human. In some embodiments, the TREM2 agonist antigen binding protein comprises

[0278] (a) a light chain variable region comprising the amino acid sequence of SEQ ID NO:326 and a heavy chain variable region comprising the amino acid sequence of SEQ ID NO:327;

[0279] (b) a light chain variable region comprising the amino acid sequence of SEQ ID NO:328 and a heavy chain variable region comprising the amino acid sequence of SEQ ID NO:329;

[0280] (c) a light chain variable region comprising the amino acid sequence of SEQ ID NO:330 and a heavy chain variable region comprising the amino acid sequence of SEQ ID NO:331; or

[0281] (d) a light chain variable region comprising the amino acid sequence of SEQ ID NO:332 and a heavy chain variable region comprising the amino acid sequence of SEQ ID NO:333.

[0282] In some embodiments, the TREM2 agonist antigen binding protein comprises a light chain variable region comprising the amino acid sequence of SEQ ID NO:330 and a heavy chain variable region comprising the amino acid sequence of SEQ ID NO:331.

[0283] In some embodiments therefore, the present invention provides a method of treating ALSP in a human patient, the method comprising administering to the patient an effective amount of a TREM2 agonist antigen binding protein comprising a light chain variable region comprising the amino acid sequence of SEQ ID NO:330 and a heavy chain variable region comprising the amino acid sequence of SEQ ID NO:331. In certain embodiments, the antibody is human.

[0284] In some embodiments, the TREM2 agonist antigen binding proteins of the invention comprise a light chain variable region consisting of or consisting essentially of the amino acid sequence of SEQ ID NO:326, 328, 330 or 332. In some embodiments, the TREM2 agonist antigen binding proteins of the invention comprise a heavy chain variable region consisting of or consisting essentially of the amino acid sequence of SEQ ID NO:327, 329, 331 or 333. In a specific embodiment, the TREM2 agonist antigen binding proteins of the invention comprise a light chain variable region and a heavy chain variable region, wherein the light chain variable region consisting of or consisting essentially of the amino acid sequence of SEQ ID NO:326 and the heavy chain variable region consisting of or consisting essentially of the amino acid sequence of SEQ ID NO:327. In a specific embodiment, the TREM2 agonist antigen binding proteins of the invention comprise a light chain variable region and a heavy chain variable region, wherein the light chain variable region consisting of or consisting essentially of the amino acid sequence of SEQ ID NO:328 and the heavy chain variable region consisting of or consisting essentially of the amino acid sequence of SEQ ID NO:329. In a specific embodiment, the TREM2 agonist antigen binding proteins of the invention comprise a light chain variable region and a heavy chain variable region, wherein the light chain variable region consisting of or consisting essentially of the amino acid sequence of SEQ ID NO:330 and the heavy chain variable region consisting of or consisting essentially of the amino acid sequence of SEQ ID NO:331. In a specific embodiment, the TREM2 agonist antigen binding proteins of the invention comprise a light chain variable region and a heavy chain variable region, wherein the light chain variable region consisting of or consisting essentially of the amino acid sequence of SEQ ID NO:332 and the heavy chain variable region consisting of or consisting essentially of the amino acid sequence of SEQ ID NO:333.

[0285] In some embodiments, each of the light chain variable regions disclosed in TABLES A1, A10, A12, and A14 and each of the heavy chain variable regions disclosed in TABLES A2, All, A13, and 3E may be attached to the light chain constant regions (TABLE EN1) and heavy chain constant regions (EN2) to form complete antibody light and heavy chains, respectively, as further discussed below. Further, each of the generated heavy and light chain sequences may be combined to form a complete antibody structure. It should be understood that the heavy chain and light chain variable regions provided herein can also be attached to other constant domains having different sequences than the exemplary sequences listed herein.

[0286] In some embodiments, exemplary TREM2 agonist antibody having a light chain variable region with a light chain constant domain and a heavy chain variable region with a heavy chain constant region are disclosed in TABLE A15.

TABLE A15
Light Chain and Heavy Chain Amino Acid Sequences
of Exemplary Antibodies

| Ab ID. | | Sequence |
|---|---|---|
| 24G6 | LC | MDMRVPAQLLGLLLLWLRGARCDIVMTQSPDSLAVSLGERATIN |
| (SST28347) | | CKSSQSVLYSSNNKHFLAWYQQKPGQPPKLLIYWASTRESGVPD |
| | | RFSGSGSGTDFTLTISSLQAEDVAVYYCQQYYSTPLTFGGGTKVE |
| | | IKRTVAAPSVFIFPPSDEQLKSGTASVVCLLNNFYPREAKVQWKV |
| | | DNALQSGNSQESVTEQDSKDSTYSLSSTLTLSKADYEKHKVYAC |
| | | EVTHQGLSSPVTKSFNRGEC (SEQ ID NO: 334) |
| | HC | MDMRVPAQLLGLLLLWLRGARCEVQLLESGGGLVQPGGSLRLS |
| | | CAASGFTFSSYAMSWVRQAPGKGLEWVSAISGSGGSTYYAESVK |
| | | GRFTISRDNSKNTLYLQMNSLRAEDTAVYYCAKAYTPMAFFDY |
| | | WGQGTLVTVSSASTKGPSVFPLAPSSKSTSGGTAALGCLVKDYFP |
| | | EPVTVSWNSGALTSGVHTFPAVLQSSGLYSLSSVVTVPSSSLGTQ |
| | | TYICNVNHKPSNTKVDKKVEPKSCDKTHTCPPCPAPELLGGPSVF |
| | | LFPPKPKDTLMISRTPEVTCVVVDVSHEDPEVKFNWYVDGVEVH |
| | | NAKTKPCEEQYGSTYRCVSVLTVLHQDWLNGKEYKCKVSNKAL |
| | | PAPIEKTISKAKGQPREPQVYTLPPSREEMTKNQVSLTCLVKGFY |
| | | PSDIAVEWESNGQPENNYKTTPPVLDSDGSFFLYSKLTVDKSRW |
| | | QQGNVFSCSVMHEALHNHYTQKSLSLSPGK (SEQ ID NO: 335) |
| 24G6 | LC | MDMRVPAQLLGLLLLWLRGARCDIVMTQSPDSLAVSLGERATIN |
| (SST204812) | | CKSSQSVLYSSNNKHFLAWYQQKPGQPPKLLIYWASTRESGVPD |
| | | RFSGSGSGTDFTLTISSLQAEDVAVYYCQQYYSTPLTFGGGTKVE |
| | | IKRTVAAPSVFIFPPSDEQLKSGTASVVCLLNNFYPREAKVQWKV |
| | | DNALQSGNSQESVTEQDSKDSTYSLSSTLTLSKADYEKHKVYAC |
| | | EVTHQGLSSPVTKSFNRGEC (SEQ ID NO: 334) |
| | HC | MDMRVPAQLLGLLLLWLRGARCEVQLLESGGGLVQPGGSLRLS |
| | | CAASGFTFSSYAMSWVRQAPGKGLEWVSAISGSGGSTYYAESVK |
| | | GRFTISRDNSKNTLYLQMNSLRAEDTAVYYCAKAYTPMAFFDY |
| | | WGQGTLVTVSSASTKGPSVFPLAPSSRSTSESTAALGCLVKDYFP |
| | | EPVTVSWNSGALTSGVHTFPAVLQSSGLYSLSSVVTVPSSNFGTQ |
| | | TYTCNVDHKPSNTKVDKTVERKCCVECPPCPAPELLGGPSVFLFP |
| | | PKPKDTLMISRTPEVTCVVVDVSHEDPEVKFNWYVDGVEVHNA |
| | | KTKPCEEQYGSTYRCVSVLTVLHQDWLNGKEYKCKVSNKALPA |
| | | PIEKTISKAKGQPREPQVYTLPPSREEMTKNQVSLTCLVKGFYPS |
| | | DIAVEWESNGQPENNYKTTPPVLDSDGSFFLYSKLTVDKSRWQQ |
| | | GNVFSCSVMHEALHNHYTQKSLSLSPGK (SEQ ID NO: 336) |
| 6E7 | LC | MDMRVPAQLLGLLLLWLRGARCDIQMTQSPSSVSASVGDRVTIT |
| (SST29857) | | CRASQGISSWLAWYQQKPGKAPKLLIYAASSLQSGVPSRFSGSGS |
| | | GTDFTLTISSLQPEDFATYFCQQADAFPRTFGQGTKLEIKRTVAAP |
| | | SVFIFPPSDEQLKSGTASVVCLLNNFYPREAKVQWKVDNALQSG |
| | | NSQESVTEQDSKDSTYSLSSTLTLSKADYEKHKVYACEVTHQGL |
| | | SSPVTKSFNRGEC (SEQ ID NO: 337) |
| | HC | MDMRVPAQLLGLLLLWLRGARCEVQLVQSGAEVKKPGESLKIS |
| | | CKGSGYSFTSYWIAWVRQMPGKGLEWMGITYPGDADARYSPSF |
| | | QGQVTISADKSISTAYLQWSSLKASDTAMYFCARQRTFYYDSSD |
| | | YFDYWGQGTLVTVSSASTKGPSVFPLAPSSRSTSESTAALGCLVK |
| | | DYFPEPVTVSWNSGALTSGVHTFPAVLQSSGLYSLSSVVTVPSSN |
| | | FGTQTYTCNVDHKPSNTKVDKTVERKCCVECPPCPAPELLGGPS |
| | | VFLFPPKPKDTLMISRTPEVTCVVVDVSHEDPEVKFNWYVDGVE |
| | | VHNAKTKPCEEQYGSTYRCVSVLTVLHQDWLNGKEYKCKVSNK |
| | | ALPAPIEKTISKAKGQPREPQVYTLPPSREEMTKNQVSLTCLVKG |
| | | FYPSDIAVEWESNGQPENNYKTTPPVLDSDGSFFLYSKLTVDKSR |
| | | WQQGNVFSCSVMHEALHNHYTQKSLSLSPGK (SEQ ID NO: 338) |
| 13E7 | LC | MDMRVPAQLLGLLLLWLRGARCEIVMTQSPATLSVSPGERATLS |
| (SST202443) | | CRASQSVSSNLAWFQQKPGQAPRLLIYGASTRATGIPARFSGSGS |
| | | GTEFTLTISSLQPEDFAVYYCLQDNNFPPTFGQGTKVDIKRTVAA |
| | | PSVFIFPPSDEQLKSGTASVVCLLNNFYPREAKVQWKVDNALQS |
| | | GNSQESVTEQDSKDSTYSLSSTLTLSKADYEKHKVYACEVTHQG |
| | | LSSPVTKSFNRGEC (SEQ ID NO: 339) |
| | HC | MDMRVPAQLLGLLLLWLRGARCEVQLVQSGAEVKKPGESLKIS |
| | | CKGSGYSFTSYWIGWVRQMPGKGLEWMGITYPGDADARYSPSF |
| | | QGQVTISADKSISTAYLQWSSLKASDTAMYFCARRRQGIFGDAL |
| | | DFWGQGTLVTVSSASTKGPSVFPLAPSSKSTSGGTAALGCLVKD |
| | | YFPEPVTVSWNSGALTSGVHTFPAVLQSSGLYSLSSVVTVPSSSL |
| | | GTQTYICNVNHKPSNTKVDKKVEPKSCDKTHTCPPCPAPELLGG |
| | | PSVFLFPPKPKDTLMISRTPEVTCVVVDVSHEDPEVKFNWYVDG |
| | | VEVHNAKTKPCEEQYGSTYRCVSVLTVLHQDWLNGKEYKCKVS |
| | | NKALPAPIEKTISKAKGQPREPQVYTLPPSREEMTKNQVSLTCLV |
| | | KGFYPSDIAVEWESNGQPENNYKTTPPVLDSDGSFFLYSKLTVDK |
| | | SRWQQGNVFSCSVMHEALHNHYTQKSLSLSPGK |
| | | (SEQ ID NO: 340) |
| 5E3 (SST29825) | LC | MDMRVPAQLLGLLLLWLRGARCDIQMTQSPSSLSASVGDRVTIT |
| | | CRASQGISNYLAWYQQKPGKAPKSLIYAASSLQSGVPSRFSGSGS |
| | | GTDFTLTISSLQPEDFATYYCQQYSTYPFTFGQGTKVDIKRTVAA |
| | | PSVFIFPPSDEQLKSGTASVVCLLNNFYPREAKVQWKVDNALQS |
| | | GNSQESVTEQDSKDSTYSLSSTLTLSKADYEKHKVYACEVTHQG |
| | | LSSPVTKSFNRGEC (SEQ ID NO: 341) |
| | HC | MDMRVPAQLLGLLLLWLRGARCQVQLVQSGAEVKKPGASVKV |
| | | SCKASGYTFTGYYIHWVRQAPGQGLEWMGWINPYSGGTTSAQK |
| | | FQGRVTMTRDTSTSSAYMELSRLRSDDTAVYYCARDAGYLALY |
| | | GTDVWGQGTLVTVSSASTKGPSVFPLAPSSRSTSESTAALGCLVK |
| | | DYFPEPVTVSWNSGALTSGVHTFPAVLQSSGLYSLSSVVTVPSSN |
| | | FGTQTYTCNVDHKPSNTKVDKTVERKCCVECPPCPAPELLGGPS |
| | | VFLFPPKPKDTLMISRTPEVTCVVVDVSHEDPEVKFNWYVDGVE |
| | | VHNAKTKPCEEQYGSTYRCVSVLTVLHQDWLNGKEYKCKVSNK |
| | | ALPAPIEKTISKAKGQPREPQVYTLPPSREEMTKNQVSLTCLVKG |
| | | FYPSDIAVEWESNGQPENNYKTTPPVLDSDGSFFLYSKLTVDKSR |
| | | WQQGNVFSCSVMHEALHNHYTQKSLSLSPGK (SEQ ID NO: 342) |
| 24G6-1 | LC | DIVMTQSPDSLAVSLGERATINCKSSQSVLYSSNNKHFLAWYQQ |
| (SST28347-1) | | KPGQPPKLLIYWASTRESGVPDRFSGSGSGTDFTLTISSLQAEDVA |
| | | VYYCQQYYSTPLTFGGGTKVEIKRTVAAPSVFIFPPSDEQLKSGT |
| | | ASVVCLLNNFYPREAKVQWKVDNALQSGNSQESVTEQDSKDST |
| | | YSLSSTLTLSKADYEKHKVYACEVTHQGLSSPVTKSFNRGEC |
| | | (SEQ ID NO: 2768) |
| | HC | EVQLLESGGGLVQPGGSLRLSCAASGFTFSSYAMSWVRQAPGKG |
| | | LEWVSAISGSGGSTYYAESVKGRFTISRDNSKNTLYLQMNSLRAE |
| | | DTAVYYCAKAYTPMAFFDYWGQGTLVTVSSASTKGPSVFPLAPS |
| | | SKSTSGGTAALGCLVKDYFPEPVTVSWNSGALTSGVHTFPAVLQ |
| | | SSGLYSLSSVVTVPSSSLGTQTYICNVNHKPSNTKVDKKVEPKSC |
| | | DKTHTCPPCPAPELLGGPSVFLFPPKPKDTLMISRTPEVTCVVVD |
| | | VSHEDPEVKFNWYVDGVEVHNAKTKPCEEQYGSTYRCVSVLTV |
| | | LHQDWLNGKEYKCKVSNKALPAPIEKTISKAKGQPREPQVYTLP |
| | | PSREEMTKNQVSLTCLVKGFYPSDIAVEWESNGQPENNYKTTPP |
| | | VLDSDGSFFLYSKLTVDKSRWQQGNVFSCSVMHEALHNHYTQK |
| | | SLSLSPGK (SEQ ID NO: 2769) |
| 24G6-1 | LC | DIVMTQSPDSLAVSLGERATINCKSSQSVLYSSNNKHFLAWYQQ |
| (SST28347-1) | | KPGQPPKLLIYWASTRESGVPDRFSGSGSGTDFTLTISSLQAEDVA |
| | | VYYCQQYYSTPLTFGGGTKVEIKRTVAAPSVFIFPPSDEQLKSGT |
| | | ASVVCLLNNFYPREAKVQWKVDNALQSGNSQESVTEQDSKDST |
| | | YSLSSTLTLSKADYEKHKVYACEVTHQGLSSPVTKSFNRGEC |
| | | (SEQ ID NO: 2768) |
| | HC | EVQLLESGGGLVQPGGSLRLSCAASGFTFSSYAMSWVRQAPGKG |
| | | LEWVSAISGSGGSTYYAESVKGRFTISRDNSKNTLYLQMNSLRAE |
| | | DTAVYYCAKAYTPMAFFDYWGQGTLVTVSSASTKGPSVFPLAPS |
| | | SRSTSESTAALGCLVKDYFPEPVTVSWNSGALTSGVHTFPAVLQS |
| | | SGLYSLSSVVTVPSSNFGTQTYTCNVDHKPSNTKVDKTVERKCC |
| | | VECPPCPAPELLGGPSVFLFPPKPKDTLMISRTPEVTCVVVDVSHE |
| | | DPEVKFNWYVDGVEVHNAKTKPCEEQYGSTYRCVSVLTVLHQD |
| | | WLNGKEYKCKVSNKALPAPIEKTISKAKGQPREPQVYTLPPSREE |
| | | MTKNQVSLTCLVKGFYPSDIAVEWESNGQPENNYKTTPPVLDSD |
| | | GSFFLYSKLTVDKSRWQQGNVFSCSVMHEALHNHYTQKSLSLSP |
| | | G (SEQ ID NO: 2770) |
| 6E7-1 | LC | DIQMTQSPSSVSASVGDRVTITCRASQGISSWLAWYQQKPGKAP |
| (SST29857-1) | | KLLIYAASSLQSGVPSRFSGSGSGTDFTLTISSLQPEDFATYFCQQ |
| | | ADAFPRTFGQGTKLEIKRTVAAPSVFIFPPSDEQLKSGTASVVCLL |
| | | NNFYPREAKVQWKVDNALQSGNSQESVTEQDSKDSTYSLSSTLT |
| | | LSKADYEKHKVYACEVTHQGLSSPVTKSFNRGEC |
| | | (SEQ ID NO: 2771) |
| | HC | EVQLVQSGAEVKKPGESLKISCKGSGYSFTSYWIAWVRQMPGKG |
| | | LEWMGIIYPGDADARYSPSFQGQVTISADKSISTAYLQWSSLKAS |
| | | DTAMYFCARQRTFYYDSSDYFDYWGQGTLVTVSSASTKGPSVFP |
| | | LAPSSRSTSESTAALGCLVKDYFPEPVTVSWNSGALTSGVHTFPA |
| | | VLQSSGLYSLSSVVTVPSSNFGTQTYTCNVDHKPSNTKVDKTVE |
| | | RKCCVECPPCPAPELLGGPSVFLFPPKPKDTLMISRTPEVTCVVVD |
| | | VSHEDPEVKFNWYVDGVEVHNAKTKPCEEQYGSTYRCVSVLTV |
| | | LHQDWLNGKEYKCKVSNKALPAPIEKTISKAKGQPREPQVYTLP |
| | | PSREEMTKNQVSLTCLVKGFYPSDIAVEWESNGQPENNYKTTPP |
| | | VLDSDGSFFLYSKLTVDKSRWQQGNVFSCSVMHEALHNHYTQK |
| | | SLSLSPG (SEQ ID NO: 2772) |
| 13E7-1 | LC | EIVMTQSPATLSVSPGERATLSCRASQSVSSNLAWFQQKPGQAPR |
| (SST202443-1) | | LLIYGASTRATGIPARFSGSGSGTEFTLTISSLQPEDFAVYYCLQD |
| | | NNFPPTFGQGTKVDIKRTVAAPSVFIFPPSDEQLKSGTASVVCLLN |
| | | NFYPREAKVQWKVDNALQSGNSQESVTEQDSKDSTYSLSSTLTL |
| | | SKADYEKHKVYACEVTHQGLSSPVTKSFNRGEC |
| | | (SEQ ID NO: 2773) |
| | HC | EVQLVQSGAEVKKPGESLKISCKGSGYSFTSYWIGWVRQMPGKG |
| | | LEWMGIIYPGDADARYSPSFQGQVTISADKSISTAYLQWSSLKAS |
| | | DTAMYFCARRRQGIFGDALDFWGQGTLVTVSSASTKGPSVFPLA |
| | | PSSKSTSGGTAALGCLVKDYFPEPVTVSWNSGALTSGVHTFPAV |
| | | LQSSGLYSLSSVVTVPSSSLGTQTYICNVNHKPSNTKVDKKVEPK |
| | | SCDKTHTCPPCPAPELLGGPSVFLFPPKPKDTLMISRTPEVTCVVV |
| | | DVSHEDPEVKFNWYVDGVEVHNAKTKPCEEQYGSTYRCVSVLT |
| | | VLHQDWLNGKEYKCKVSNKALPAPIEKTISKAKGQPREPQVYTL |
| | | PPSREEMTKNQVSLTCLVKGFYPSDIAVEWESNGQPENNYKTTPP |
| | | VLDSDGSFFLYSKLTVDKSRWQQGNVFSCSVMHEALHNHYTQK |
| | | SLSLSPG (SEQ ID NO: 2774) |
| 5E3-1 | LC | DIQMTQSPSSLSASVGDRVTITCRASQGISNYLAWYQQKPGKAPK |
| (SST29825-1) | | SLIYAASSLQSGVPSRFSGSGSGTDFTLTISSLQPEDFATYYCQQY |
| | | STYPFTFGQGTKVDIKRTVAAPSVFIFPPSDEQLKSGTASVVCLLN |
| | | NFYPREAKVQWKVDNALQSGNSQESVTEQDSKDSTYSLSSTLTL |
| | | SKADYEKHKVYACEVTHQGLSSPVTKSFNRGEC |
| | | (SEQ ID NO: 2775) |
| | HC | QVQLVQSGAEVKKPGASVKVSCKASGYTFTGYYIHWVRQAPGQ |
| | | GLEWMGWINPYSGGTTSAQKFQGRVTMTRDTSTSSAYMELSRL |
| | | RSDDTAVYYCARDAGYLALYGTDVWGQGTLVTVSSASTKGPSV |
| | | FPLAPSSRSTSESTAALGCLVKDYFPEPVTVSWNSGALTSGVHTF |
| | | PAVLQSSGLYSLSSVVTVPSSNFGTQTYTCNVDHKPSNTKVDKT |
| | | VERKCCVECPPCPAPELLGGPSVFLFPPKPKDTLMISRTPEVTCVV |
| | | VDVSHEDPEVKFNWYVDGVEVHNAKTKPCEEQYGSTYRCVSVL |
| | | TVLHQDWLNGKEYKCKVSNKALPAPIEKTISKAKGQPREPQVYT |
| | | LPPSREEMTKNQVSLTCLVKGFYPSDIAVEWESNGQPENNYKTTP |
| | | PVLDSDGSFFLYSKLTVDKSRWQQGNVFSCSVMHEALHNHYTQ |
| | | KSLSLSPG (SEQ ID NO: 2776) |
| 13E7 Variant | LC | EIVMTQSPATLSVSPGERATLSCRASQSVSSNLAWFQQKPGQAPR |
| | | LLIYGASTRATGIPARFSGSGSGTEFTLTISSLQPEDFAVYYCLQD |
| | | NNFPPTFGQGTKVDIKRTVAAPSVFIFPPSDEQLKSGTASVVCLLN |
| | | NFYPREAKVQWKVDNALQSGNSQESVTEQDSKDSTYSLSSTLTL |
| | | SKADYEKHKVYACEVTHQGLSSPVTKSFNRGEC |
| | | (SEQ ID NO: 2777) |
| | HC | EVQLVQSGAEVKKPGESLKISCKGSGYSFTSYWIGWVRQMPGKG |
| | | LEWMGIIYPGDADARYSPSFQGQVTISADKSISTAYLQWSSLKAS |
| | | DTAMYFCARRRQGIFGDALDFWGQGTLVTVSSASTKGPSVFPLA |
| | | PSSKSTSGGTAALGCLVKDYFPEPVTVSWNSGALTSGVHTFPAV |
| | | LQSSGLYSLSSVVTVPSSSLGTQTYICNVNHKPSNTKVDKKVEPK |
| | | SCDKTHTCPPCPAPELLGGPSVFLFPPKPKDTLMISRTPEVTCVVV |
| | | DVSHEDPEVKFNWYVDGVEVHNAKTKPCEEQYGSTYRCVSVLT |
| | | VLHQDWLNGKEYKCKVSNKALPAPIEKTISKAKGQPREPQVYTL |
| | | PPSREEMTKNQVSLTCLVKGFYPSDIAVEWESNGQPENNYKTTPP |
| | | VLDSDGSFFLYSKLTVDKSRWQQGNVFSCSVMHEALHNHYTQK |
| | | SLSLSPGK (SEQ ID NO: 2778) |

[0287] In some embodiments, the TREM2 agonist antigen binding proteins of the invention comprise a light chain comprising the sequence of SEQ ID NO:334 and a heavy chain comprising the sequence of SEQ ID NO:335. In some embodiments, the TREM2 agonist antigen binding proteins of the invention comprise a light chain comprising the sequence of SEQ ID NO:334 and a heavy chain comprising the sequence of SEQ ID NO:336. In some embodiments, the TREM2 agonist antigen binding proteins of the invention comprise a light chain comprising the sequence of SEQ ID NO:337 and a heavy chain comprising the sequence of SEQ ID NO:338. In some embodiments, the TREM2 agonist antigen binding proteins of the invention comprise a light chain comprising the sequence of SEQ ID NO:339 and a heavy chain comprising the sequence of SEQ ID NO:340. In some embodiments, the TREM2 agonist antigen binding proteins of the invention comprise a light chain comprising the sequence of SEQ ID NO:341 and a heavy chain comprising the sequence of SEQ ID NO:342. In some embodiments, the TREM2 agonist antigen binding proteins of the invention comprise a light chain comprising the sequence of SEQ ID NO:2768 and a heavy chain comprising the sequence of SEQ ID NO:2769. In some embodiments, the TREM2 agonist antigen binding proteins of the invention comprise a light chain comprising the sequence of SEQ ID NO:2768 and a heavy chain comprising the sequence of SEQ ID NO:2770. In some embodiments, the TREM2 agonist antigen binding proteins of the invention comprise a light chain comprising the sequence of SEQ ID NO:2771 and a heavy chain comprising the sequence of SEQ ID NO:2772. In some embodiments, the TREM2 agonist antigen binding proteins of the invention comprise a light chain comprising the sequence of SEQ ID NO:2773 and a heavy chain comprising the sequence of SEQ ID NO:2774. In some embodiments, the TREM2 agonist antigen binding proteins of the invention comprise a light chain comprising the sequence of SEQ ID NO:2775 and a heavy chain comprising the sequence of SEQ ID NO:2776.

[0288] In some embodiments, the present invention provides a method of treating ALSP in a human patient, the method comprising administering to the patient an effective amount of a TREM2 agonist antigen binding protein comprising a light chain comprising the sequence of SEQ ID NO:334 and a heavy chain comprising the sequence of SEQ ID NO:335. In some embodiments, the present invention provides a method of treating ALSP in a human patient, the method comprising administering to the patient an effective amount of a TREM2 agonist antigen binding protein comprising a light chain comprising the sequence of SEQ ID NO:334 and a heavy chain comprising the sequence of SEQ ID NO:336. In some embodiments, the present invention provides a method of treating ALSP in a human patient, the method comprising administering to the patient an effective amount of a TREM2 agonist antigen binding protein comprising a light chain comprising the sequence of SEQ ID NO:337 and a heavy chain comprising the sequence of SEQ ID NO:338. In some embodiments, the present invention provides a method of treating ALSP in a human patient, the method comprising administering to the patient an effective amount of a TREM2 agonist antigen binding protein comprising a light chain comprising the sequence of SEQ ID NO:339 and a heavy chain comprising the sequence of SEQ ID NO:340. In some embodiments, the present invention provides a method of treating ALSP in a human patient, the method comprising administering to the patient an effective amount of a TREM2 agonist antigen binding protein comprising a light chain comprising the sequence of SEQ ID NO:341 and a heavy chain comprising the sequence of SEQ ID NO:342. In some embodiments, the present invention provides a method of treating ALSP in a human patient, the method comprising administering to the patient an effective amount of a TREM2 agonist antigen binding protein comprising a light chain comprising the sequence of SEQ ID NO:2768 and a heavy chain comprising the sequence of SEQ ID NO:2769. In some embodiments, the present invention provides a method of treating ALSP in a human patient, the method comprising administering to the patient an effective amount of a TREM2 agonist antigen binding protein comprising a light chain comprising the sequence of SEQ ID NO:2768 and a heavy chain comprising the sequence of SEQ ID NO:2770. In some embodiments, the present invention provides a method of treating ALSP in a human patient, the method comprising administering to the patient an effective amount of a TREM2 agonist antigen binding protein comprising a light chain comprising the sequence of SEQ ID NO:2771 and a heavy chain comprising the sequence of SEQ ID NO:2772. In some embodiments therefore, the present invention provides a method of treating ALSP in a human patient, the method comprising administering to the patient an effective amount of a TREM2 agonist antigen binding protein comprising a light chain comprising the sequence of SEQ ID NO:2773 and a heavy chain comprising the sequence of SEQ ID NO:2774. In some embodiments, the present invention provides a method of treating ALSP in a human patient, the method comprising administering to the patient an effective amount of a TREM2 agonist antigen binding protein comprising a light chain comprising the sequence of SEQ ID NO:2775 and a heavy chain comprising the sequence of SEQ ID NO:2776. In some embodiments, the present invention provides a method of treating ALSP in a human patient, the method comprising administering to the patient an effective amount of a TREM2 agonist antigen binding protein comprising a light chain comprising the sequence of SEQ ID NO:2777 and a heavy chain comprising the sequence of SEQ ID NO:2778.

[0289] In some embodiments, the TREM2 agonist antigen binding proteins of the invention comprise a light chain consisting of or consisting essentially of the amino acid sequence of SEQ ID NO:334, 337, 339 or 341. In some embodiments, the TREM2 agonist antigen binding proteins of the invention comprise a light chain consisting of or consisting essentially of the amino acid sequence of SEQ ID NO:2768, 2771, 2773, or 2775. In some embodiments, the TREM2 agonist antigen binding proteins of the invention comprise a heavy chain consisting of or consisting essentially of the amino acid sequence of SEQ ID NO:335, 336, 338, 340, or 342. In some embodiments, the TREM2 agonist antigen binding proteins of the invention comprise a heavy chain consisting of or consisting essentially of the amino acid sequence of SEQ ID NO:2769, 2770, 2772, 2774, or 2776. In a specific embodiment, the TREM2 agonist antigen binding proteins of the invention comprise a light chain and a heavy chain, wherein:

[0290] (a) the light chain consisting of or consisting essentially of the amino acid sequence of SEQ ID NO:334 and the heavy chain consisting of or consisting essentially of the amino acid sequence of SEQ ID NO:335;

[0291] (b) the light chain consisting of or consisting essentially of the amino acid sequence of SEQ ID NO:334 and the heavy chain consisting of or consisting essentially of the amino acid sequence of SEQ ID NO:336;

[0292] (c) the light chain consisting of or consisting essentially of the amino acid sequence of SEQ ID NO:337 and the heavy chain consisting of or consisting essentially of the amino acid sequence of SEQ ID NO:338;

[0293] (d) the light chain consisting of or consisting of essentially of the amino acid sequence of SEQ ID NO:339 and the heavy chain consisting of or consisting essentially of the amino acid sequence of SEQ ID NO:340; or

[0294] (e) the light chain consisting of or consisting essentially of the amino acid sequence of SEQ ID NO:341 and the heavy chain consisting of or consisting essentially of the amino acid sequence of SEQ ID NO:342.

[0295] In a specific embodiment, the TREM2 agonist antigen binding proteins of the invention comprise a light chain and a heavy chain, wherein:

[0296] (a) the light chain consisting of or consisting essentially of the amino acid sequence of SEQ ID NO:2768 and the heavy chain consisting of or consisting essentially of the amino acid sequence of SEQ ID NO:2769;

[0297] (b) the light chain consisting of or consisting essentially of the amino acid sequence of SEQ ID NO:2768 and the heavy chain consisting of or consisting essentially of the amino acid sequence of SEQ ID NO:2770;

[0298] (c) the light chain consisting of or consisting essentially of the amino acid sequence of SEQ ID NO:2771 and the heavy chain consisting of or consisting essentially of the amino acid sequence of SEQ ID NO:2772;

[0299] (d) the light chain consisting of or consisting of essentially of the amino acid sequence of SEQ ID NO:2773 and the heavy chain consisting of or consisting essentially of the amino acid sequence of SEQ ID NO:2774;

[0300] (e) the light chain consisting of or consisting essentially of the amino acid sequence of SEQ ID NO:2775 and the heavy chain consisting of or consisting essentially of the amino acid sequence of SEQ ID NO:2776; or

[0301] (f) the light chain consisting of or consisting essentially of the amino acid sequence of SEQ ID NO:2777 and the heavy chain consisting of or consisting essentially of the amino acid sequence of SEQ ID NO:2778.

[0302] Unless indicated otherwise by reference to a specific sequence and in related discussions, the numbering of the amino acid residues in an immunoglobulin heavy chain or light chain is according to Kabat-EU numbering as described in Kabat et al., Sequences of Proteins of Immunological Interest, 5th Ed., US Department of Health and Human Services, NIH publication No. 91-3242, pp 662,680,689 (1991) and Edelman et al., Proc. Natl. Acad. USA, Vol. 63: 78-85 (1969). The Kabat numbering scheme is typically used when referring to the position of an amino acid within the variable regions, whereas the EU numbering scheme is generally used when referring to the position of an amino acid with an immunoglobulin constant region.

[0303] In some embodiments, the TREM2 antigen binding protein comprise an antibody that competes with an antibody comprising CDRL1, CDRL2, CDRL3 or light chain variable region disclosed in TABLES A1, A10, A12, and A14, and a heavy chain variable region disclosed in TABLES A2, All, A13, and A14. In some embodiments, a suitable assay for detecting competitive binding employs kinetic sensors used with Octet® systems (Pall ForteBio), which measures binding interactions using bio-layer interferometry methodology. One group of antibodies, antibodies 10E3, 13E7, 24F4, 4C5, 4G10, 32E3, and 6E7, competed with each other for binding to human TREM2, indicating that they share the same or similar epitope on human TREM2. Antibodies 16B8, 26A10, 26C10, 26F2, 33B12, and 5E3 compete with each other for TREM2 binding, but does not compete with antibodies in the first group or antibodies 24A10, 24G6, or 25F12, indicating that this second group of antibodies bind to a distinct epitope on human TREM2. Antibodies 24A10 and 24G6 share a similar epitope on human TREM2 as these two antibodies compete with each other for human TREM2 binding, but did not compete with any other antibody. Antibody 25F12 did not compete with any of the other tested antibodies for human TREM2 binding, indicating that this antibody binds to yet another epitope.

[0304] In some embodiments, a TREM2 agonist antigen binding protein competes with a reference antibody for binding to human TREM2, wherein the reference antibody comprises a light chain variable region comprising a sequence selected from SEQ ID NOS:46-63 and a heavy chain variable region comprising a sequence selected from SEQ ID NOS:110-126. In other embodiments, a TREM2 agonist antigen binding protein of the invention competes with a reference antibody for binding to human TREM2, wherein the reference antibody comprises a light chain variable region comprising a sequence selected from SEQ ID NOS:153-162 and a heavy chain variable region comprising a sequence selected from SEQ ID NOS:180-190. In still other embodiments, a TREM2 agonist antigen binding protein of the invention competes with a reference antibody for binding to human TREM2, wherein the reference antibody comprises a light chain variable region comprising a sequence selected from SEQ ID NOS:61 and 295-300 and a heavy chain variable region comprising a sequence selected from SEQ ID NOS:124 and 307-312. In certain embodiments, a TREM2 agonist antigen binding protein of the invention competes for binding to human TREM2 with one or more of the anti-TREM2 antibodies described herein, including 12G10, 26A10, 26C10, 26F2, 33B12, 24C12, 24G6, 24A10, 10E3, 13E7, 14C12, 25F12, 32E3, 24F4, 16B8, 4C5, 6E7, 5E3, 4G10, V3, V9, V10, V23, V24, V27, V30, V33, V40, V44, V48, V49, V52, V57, V60, V68, V70, V73, V76, V83, V84, and V90.

[0305] In some embodiments, the TREM2 agonist antigen binding protein competes with a reference antibody for binding to human TREM2, wherein the reference antibody comprises a light chain variable region comprising the sequence of SEQ ID NO:61 and a heavy chain variable region comprising the sequence of SEQ ID NO:124. In such embodiments, antigen binding proteins that compete with this reference antibody for binding to human TREM2 would bind the same or similar epitope as antibody 6E7 or any of the other antibodies 10E3, 13E7, 24F4, 4C5, 4G10, and 32E3.

[0306] In some embodiments, the TREM2 agonist antigen binding protein competes with a reference antibody for binding to human TREM2, wherein the reference antibody comprises a light chain variable region comprising the sequence of SEQ ID NO:62 and a heavy chain variable region comprising the sequence of SEQ ID NO:125. In such embodiments, antigen binding proteins that compete with this reference antibody for binding to human TREM2 would bind the same or similar epitope as antibody 5E3 or any of the other antibodies 16B8, 26A10, 26C10, 26F2, and 33B12.

[0307] In some embodiments, the TREM2 agonist antigen binding protein competes with a reference antibody for binding to human TREM2, wherein the reference antibody comprises a light chain variable region comprising the sequence of SEQ ID NO:52 and a heavy chain variable region comprising the sequence of SEQ ID NO:115. In such embodiments, antigen binding proteins that compete with this reference antibody for binding to human TREM2 would bind the same or similar epitope as antibody 24G6 or antibody 24A10.

[0308] In some embodiments, the TREM2 agonist antigen binding protein competes with a reference antibody for binding to human TREM2, wherein the reference antibody comprises a light chain variable region comprising the sequence of SEQ ID NO:56 and a heavy chain variable region comprising the sequence of SEQ ID NO:119. In such embodiments, antigen binding proteins that compete with this reference antibody for binding to human TREM2 would bind the same or similar epitope as antibody 25F12.

[0309] In some embodiments, isolated nucleic acids encoding the anti-TREM2 binding domain of the antigen binding proteins of the invention can be used to synthesize the antigen binding protein or used to generate variants. In some embodiments, the polynucleotide may comprise a nucleotide sequence that is at least 80% identical, at least 90% identical, at least 95% identical, or at least 98% identical to any of the nucleotide sequences listed in TABLE A15.

TABLE A16
Exemplary Anti-TREM2 Antibody Variable Region Nucleic Acid Sequences

| | | |
|---|---|---|
| | VL or VH | |
| | Group | |
| Ab ID. | Designation | Nucleic Acid Sequence |

Light chain variable regions

| | | |
|---|---|---|
| 12G10 | LV-01 | CAGGCTGTGCCGACTCAGCCGTCTTCCCTCTCTGCATCTCCTGGAGT |
| | | ATTAGCCAGTCTCACCTGCACCTTACGCAGTGGCATCAATGTTGGTA |
| | | CCTACAGGATATACTGGTACCAGCAGAAGCCAGGGAGTCCTCCCCA |
| | | GTATCTCCTGAGGTACAAATCAGACTCAGATAAGCAGCAGGGCTCT |
| | | GGAGTCCCCAGCCGCTTCTCTGGATCCAAGGATGCTTCGGCCAATGC |
| | | AGGGATTTTACTCATCTCTGGGCTCCAGTCTGAGGATGAGGCTGACT |
| | | ATTACTGTATGATTTGGTACAGCAGTGCTGTGGTATTCGGCGGAGGG |
| | | ACCAAACTGACCGTCCTA (SEQ ID NO: 208) |
| 26A10 | LV-02 | TCCTATGAGCTGACTCAGCCACCCTCAGTGTCCGTGTCCCCAGGACA |
| | | GACAGCCAGCATCACCTGCTCTGGAGATAAATTGGGAGATAAGTAT |
| | | GTTTGCTGGTATCAGCAGAAGCCAGGCCAGTCCCCTGTGCTGGTCAT |
| | | CTATCAAGATAGCAAGCGGCCCTCAGGGATCCCTGAGCGATTCTCTG |
| | | GCTCCAACTCTGGGAACACAGCCACTCTGACCATCAGCGGGACCCA |
| | | GGCTATGGATGAGGCTGACTATTACTGTCAGGCGTGGGACAGTAAC |
| | | ACTGTGGTATTCGGCGGAGGGACCAAGCTGACCGTCCTA |
| | | (SEQ ID NO: 209) |
| 26C10 | LV-03 | TCCTTTGAGCTGACTCAGCCACCCTCAGTGTCCGTGTCCCCAGGACA |
| | | GACAGCCAGCATCACCTGCTCTGGAGATAAATTGGGGGATAAGTAT |
| | | GTTTGCTGGTATCAGCAGAAGCCAGGCCAGTCCCCTATGTTGGTCAT |
| | | CTATCAAGATACCAAGCGGCCCTCAGGGATCCCTGAACGATTCTCTG |
| | | GCTCCAACTCTGGGAACACAGCCACTCTGACCATCAGCGGGACCCA |
| | | GGCTATGGATGAGGCTGACTATTACTGTCAGGCGTGGGACAGCAGC |
| | | ACTGTGGTCTTCGGCGGAGGGACCAAGCTGACCGTCCTA |
| | | (SEQ ID NO: 210) |
| 26F2 | LV-04 | TCCTATGAGCTGACTCAGCCACCCTCAGTGTCCGTGTCCCCAGGACA |
| | | GACAGCCAGCATCACCTGCTCTGGAGATAAATTGGGGGATAAGTAT |
| | | GTTTGCTGGTATCAGCAGAAGCCAGGCCAGTCCCCTGTGTTGGTCAT |
| | | CTTTCAAGATAGCAAGCGGCCCTCAGGGATCCCTGAGCGATTCTCTG |
| | | GCTCCAACTCTGGGAACACAGCCACTCTGACCATCAGCGGGACCCA |
| | | GGCTATGGATGAGGCTGACTATTACTGTCAGGCGTGGGACAGCAGC |
| | | ACTGTGGTATTCGGCGGAGGGACCAAGCTGACCGTCCTA |
| | | (SEQ ID NO: 211) |
| 33B12 | LV-05 | TCCTATGAGCTGACTCAGCCACCCTCAGTGTCCGTGTCCCCAGGACA |
| | | GACAGCCAGCATCACCTGCTCTGGAGATAAATTGGGGGATAAGTAT |
| | | GTTTGCTGGTATCAGCAGAAGCCAGGCCAGTCCCCTGTGTTGGTCAT |
| | | CTATCAAGATAGCAAGCGGCCCTCAGGGATCCCTGAGCGATTCTCTG |
| | | GCTCCAACTCTGGGAACACAGCCACTCTGACCATCAGCGGGACCCA |
| | | GGCTATGGATGAGGCTGACTATTACTGTCAGGCGTGGGACAGTAGC |
| | | ACTGTGGTATTCGGCGGAGGGACCAAGCTGACCGTCCTA |
| | | (SEQ ID NO: 212) |
| 24C12 | LV-06 | GGCATCGTGATGACCCAGTCTCCAGACTCCCTGGCTGTGTCTCTGGG |
| | | CGAGAGGGCCACCATCAACTGCAAGTCCAGCCGGAGTGTTTTGTAC |
| | | AGCTCCAACAATAAGAACTACTTAGCTTGGTACCAGCAGAAACCAG |
| | | GACAGCCTCCTAAGGTGCTCATTTACTGGGCATCTACCCGGGAATCC |
| | | GGGGTCCCTGACCGATTCAGTGGCAGCGGGTCTGGGACAGATTTCA |
| | | CTCTCACCATCAGCAGCCTGCAGGCTGAAGATGTGGCAGTTTATAAC |
| | | TGTCAGCAATATTATATTACTCCGATCACCTTCGGCCAAGGGACACG |
| | | ACTGGAGATTAAA (SEQ ID NO: 213) |
| 24G6 | LV-07 | GACATCGTGATGACCCAGTCTCCAGACTCCCTGGCTGTGTCTCTGGG |
| | | CGAGAGGGCCACCATCAACTGCAAGTCCAGCCAGAGTGTTTTATAC |
| | | AGCTCCAACAATAAGCACTTCTTAGCTTGGTACCAGCAGAAACCAG |
| | | GACAGCCTCCTAAGCTGCTCATTTACTGGGCATCTACCCGGGAGTCC |
| | | GGGGTCCCTGACCGATTCAGTGGCAGCGGGTCTGGGACAGATTTCA |
| | | CTCTCACCATCAGCAGCCTGCAGGCTGAAGATGTGGCATTTTATTAC |
| | | TGTCAGCAATATTATAGTACTCCGCTCACTTTCGGCGGAGGGACCAA |
| | | GGTGGAGATCAAA (SEQ ID NO: 214) |
| 24A10 | LV-08 | GACATCGTGATGACCCAGTCTCCAGACTCCCTGGCTGTGTCTCTGGG |
| | | CGAGAGGGCCACCATCACCTGCAAGTCCAGCCACAATGTTTTATACA |
| | | GCTCCAACAATAAGAACTACTTAGCTTGGTATCAGCAGAAACCAGG |
| | | ACAGCCTCCTAAACTGCTCATTTACTGGGCATCTACCCGGGAATCCG |
| | | GGGTCCCTGACCGATTCAGTGGCAGCGGGTCTGGGACAGATTTCACT |
| | | CTCACCATCAGCAGCCTGCAGGCTGAAGATGTGGCAGTTTATTACTG |
| | | TCACCAATATTATAGTACTCCGTGCAGTTTTGGCCAGGGGACCAAGC |
| | | TGGAGATCAAA (SEQ ID NO: 215) |
| 10E3 | LV-09 | GAAATAGTGATGACGCAGTCTCCAGCCACCCTGTCTGTGTCTCCAGG |
| | | GGAAAGAGCCACCCTCTCCTGCAGGGCCAGTCAGAGTGTTAGCAGC |
| | | AACTTAGCCTGGTTCCAGCAGAAACCTGGCCAGGCTCCCAGGCTCCT |
| | | CATCTATGGTGCTTCCACCAGGGCCACTGGTATTCCAGCCAGGTTCA |
| | | GTGTCAGTGGGTCTGGGACAGAGTTCACTCTCACCATCAGCAGCCTG |
| | | CAGTCTGAAGATTTTGCATTTTATTACTGTCTGCAGGATAATAATTG |
| | | GCCTCCCACTTTCGGCCCTGGGACCAAAGTGGATATCAAA |
| | | (SEQ ID NO: 216) |
| 13E7 | LV-10 | GAAATAGTGATGACGCAGTCTCCAGCCACCCTGTCTGTGTCTCCAGG |
| | | GGAAAGAGCCACCCTCTCCTGCAGGGCCAGTCAGAGTGTTAGCAGC |
| | | AACTTAGCCTGGTTCCAGCAGAAACCTGGCCAGGCTCCCAGGCTCCT |
| | | CATCTATGGTGCTTCCACCAGGGCCACTGGTATTCCAGCCAGGTTCA |
| | | GTGTCAGTGGGTCTGGGACAGAGTTCACTCTCACCATCAGCAGCCTG |
| | | CAGTCTGAAGATTTTGCAGTTTATTACTGTCTGCAGGATAATAATTG |
| | | GCCTCCCACTTTCGGCCCTGGGACCAAAGTGGATATCAAA |
| | | (SEQ ID NO: 217) |
| 25F12 | LV-11 | GAAAAAGTGATGACGCAGTCTCCAGCCACCCTGTCTGTGTCTCCAGG |
| | | GGAAAGAGCCACCCTCTCCTGCAGGGCCAGTCAGAGTGTTAACAAC |
| | | AACTTAGCCTGGTACCAGCAGAAACCTGGCCAGGCTCCCAGGCTCCT |
| | | CATCTATGGTGCATCCACCAGGGCCACTGGTATCCCAGCCAGGTTCA |
| | | GTGGCAGTGGGTCTGGGACAGAGTTCACTCTCACCATCAGCAGCCTG |
| | | CAGTCTGAAGATTTTGCAGTTTATTACTGTCAGCAGTATAATAACTG |
| | | GCCTCGGACGTTCGGCCAAGGGACCAAGGTGGAAATCAAA |
| | | (SEQ ID NO: 218) |
| 32E3 | LV-12 | GAATTTGTGTTGACGCAGTCTCCAGGCACCCTGTCTTTGTCTCCGGG |
| | | GGAAAGAGCCACCCTCTCCTGCAGGGCCAGTCAGATTATTAGCAGC |
| | | AACTACTTAGCCTGGTACCAGCAGAAACCTGGCCAGGCTCCCAGGC |
| | | TCCTCATCTATAGTGCATCCAGCAGGGCCACTGGCATCCCAGACAGG |
| | | TTCAGTGGCAGTGGGTCTGGGACAGACTTCACTCTCACCATCAGCAG |
| | | ACTGGAGCCTGAAGATTTTGCAGTGTATTACTGTCAGCAGTTTGATA |
| | | GCTCACCGATCACCTTCGGCCGAGGGACACGACTGGACATTAAA |
| | | (SEQ ID NO: 219) |
| 24F4 | LV-13 | GAAATTGTGTTGACGCAGTCTCCAGGCACCCTGTCTTTGTCTCCAGG |
| | | GGAAAGAGCCACCCTCTCCTGCAGGGCCAGTCAGAGTGTTAGCAGC |
| | | AGCTACTTAGCCTGGTACCAGCAGAAACCTGGCCAGGCTCCCAGGC |
| | | TCCTCATCTATGGTGCATCCAGCAGGGCCACTGGCATCCCAGACAGG |
| | | TTCAGTGGCAGTGGGTCTGGGACAGACTTCACTCTCACCATCAGCAG |
| | | ACTGGAGCCTGAAGATTTTGCACTGTATTACTGTCAGCAGTATGATA |
| | | CCTCACCATTCACTTTCGGCCCTGGGACCAAAGTGGATATCAAA |
| | | (SEQ ID NO: 220) |
| 16B8 | LV-14 | GACATCCAGATGACCCAGTCTCCATCTTCCGTGTCTGCATCTGTAGG |
| | | AGACAGAGTCACCGTCACTTGTCGGGCGAGTCAGGATATTAACAGC |
| | | TGGTTAGCCTGGTATCAGCAGAAACCAGGGAAAGCCCCTAAGCTCC |
| | | TGATCTATGCTGCATCCTCTTTGCAAACTGGGGTCCCTTCAAGGTTC |
| | | AGCGGCAGTGGATCTGGGACAGATTTCACTCTCACCATCAGCAGCCT |
| | | GCAGCCTGAAGATTTTGCAACTTACTCTTGTCAACAGTCTAACAGTT |
| | | TCCCGATCACCTTCGGCCAAGGGACACGACTGGAGATTAAA |
| | | (SEQ ID NO: 221) |
| 4C5 | LV-15 | GACATCCAGATGACCCAGTCTCCATCTTCCGTGTCTGCATCTGTAGG |
| | | AGACAGAGTCACCATCACTTGTCGGGCGAGTCAGGGTATTAGCAAC |
| | | TGGTTAGCCTGGTATCAGCAGAAACCAGGGAAAGCCCCTAAGCTCC |
| | | TGATCTATGCTGCATCCAGTTTGCAAGTTGGGGTCCCATTAAGGTTC |
| | | AGCGGCAGTGGATCTGGGACAGATTTCACTCTCACCATCAGCAGCCT |
| | | GCAGCCTGAAGATTTTGCAACTTACTATTGTCAACAGGCTGACAGTT |
| | | TCCCTCGCAATTTTGGCCAGGGGACCAAGCTGGAGATCAAA |
| | | (SEQ ID NO: 222) |
| 6E7 | LV-16 | GACATCCAGATGACCCAGTCTCCATCTTCCGTGTCTGCATCTGTAGG |
| V9 | | AGACAGAGTCACCATCACTTGTCGGGCGAGTCAGGGTATTAGCAGC |
| V30 | | TGGTTAGCCTGGTATCAGCAGAAACCAGGGAAAGCCCCTAAGCTCC |
| V33 | | TGATCTATGCTGCATCCAGTTTGCAAAATGGGGTCCCATCAAGGTTC |
| V44 | | AGCGGCAGTGGATCTGGGACAGATTTCACTCTCACCATCAGCAGCCT |
| V68 | | GCAGCCTGAAGATTTTGCAACTTACTTTTGTCAACAGGCTGACAGTT |
| | | TCCCTCGCACTTTTGGCCAGGGGACCAAGCTGGAGATCAAA |
| | | (SEQ ID NO: 223) |
| 5E3 | LV-17 | GACATCCAGATGACCCAGTCTCCATCCTCACTGTCTGCATCTGTAGG |
| | | AGACAGAGTCACCATCACTTGTCGGGCGAGTCAGGGCATTAGCAAT |
| | | TATTTAGCCTGGTTTCAGCAGAAACCAGGGAAAGCCCCTAAATCCCT |
| | | GATCTATGCTGCATCCAGTTTGCAAAGTGGGGTCCCATCAAAGTTCA |
| | | GCGGCAGTGGATCTGGGACAGATTTCACTCTCACCATCAGCAGCCTG |
| | | CAGCCTGAAGATTTTGCAACTTATTACTGCCAACAGTATAGTACTTA |
| | | CCCATTCACTTTCGGCCCTGGGACCAAAGTGGATATCAAA |
| | | (SEQ ID NO: 224) |
| 4G10 | LV-18 | GACATCCAGATGACCCAGTCTCCATCCTCCCTGTCTGCATCTGTAGG |
| | | AGACAGAGTCACCATCACTTGCCGGGCAAGTCAGGGCATAAGAAAT |
| | | GATTTAGGCTGGTATCAGCAGAAACCAGGGAATGCCCCTAAGCGCC |
| | | TGATCTATGCTGCATCCAGTTTGCCAAGTGGGGTCCCATCAAGGTTC |
| | | AGCGGCAGTGGATCTGGGCCAGAATTCACTCTCACAATCAGCAGTCT |
| | | GCAGCCTGAAGATTTTGCAACTTATTACTGTCTACAGCATAATAGTT |
| | | ACCCGTGGACGTTCGGCCAAGGGACCAAGGTGGAAATCACA |
| | | (SEQ ID NO: 225) |
| V3 | LV-101 | GACATCCAGATGACCCAGTCTCCATCTTCCGTGTCTGCATCTGTAGG |
| | | AGACAGAGTCACCATCACTTGTCGGGCGAGTCAGGGTATTAGCAGC |
| | | TGGTTAGCCTGGTATCAGCAGAAACCAGGGAAAGCCCCTAAGCTCC |
| | | TGATCTATGCTGCATCCAGTAGGCAAAATGGGGTCCCATCAAGGTTC |
| | | AGCGGCAGTGGATCTGGGACAGATTTCACTCTCACCATCAGCAGCCT |
| | | GCAGCCTGAAGATTTTGCAACTTACTTTTGTCAACAGGCTGACAGGT |
| | | TCCCTCGCACTTTTGGCCAGGGGACCAAGCTGGAGATCAAA |
| | | (SEQ ID NO: 226) |
| V24 | LV-102 | GACATCCAGATGACCCAGTCTCCATCTTCCGTGTCTGCATCTGTAGG |
| | | AGACAGAGTCACCATCACTTGTCGGGCGAGTCAGGGTATTAGCAGC |
| | | TGGTTAGCCTGGTATCAGCAGAAACCAGGGAAAGCCCCTAAGCTCC |
| | | TGATCTATGCTGCATCCAGTTTGCAAAAGGGGGTCCCATCAAGGTTC |
| | | AGCGGCAGTGGATCTGGGACAGATTTCACTCTCACCATCAGCAGCCT |
| | | GCAGCCTGAAGATTTTGCAACTTACTTTTGTCAACAGGCTGACAGTT |
| | | TCCCTCATACTTTTGGCCAGGGGACCAAGCTGGAGATCAAA |
| | | (SEQ ID NO: 227) |
| V27 | LV-103 | GACATCCAGATGACCCAGTCTCCATCTTCCGTGTCTGCATCTGTAGG |
| | | AGACAGAGTCACCATCACTTGTCGGGCGAGTCAGGGTATTAGCAGC |
| | | TGGTTAGCCTGGTATCAGCAGAAACCAGGGAAAGCCCCTAAGCTCC |
| | | TGATCTATGCTGCATCCAGTTTGCAACGTGGGGTCCCATCAAGGTTC |
| | | AGCGGCAGTGGATCTGGGACAGATTTCACTCTCACCATCAGCAGCCT |
| | | GCAGCCTGAAGATTTTGCAACTTACTTTTGTCAACAGGCTGACAGTT |
| | | TCCCTCGCACTTTTGGCCAGGGGACCAAGCTGGAGATCAAA |
| | | (SEQ ID NO: 228) |
| V40 | LV-104 | GACATCCAGATGACCCAGTCTCCATCTTCCGTGTCTGCATCTGTAGG |
| | | AGACAGAGTCACCATCACTTGTCGGGCGAGTCAGGGTATTAGCAGC |
| | | TGGTTAGCCTGGTATCAGCAGAAACCAGGGAAAGCCCCTAAGCTCC |
| | | TGATCTATGCTGCATCCAGTTTGCAACTTGGGGTCCCATCAAGGTTC |
| | | AGCGGCAGTGGATCTGGGACAGATTTCACTCTCACCATCAGCAGCCT |
| | | GCAGCCTGAAGATTTTGCAACTTACTTTTGTCAACAGGCTGACCGTT |
| | | TCCCTCGCACTTTTGGCCAGGGGACCAAGCTGGAGATCAAA |
| | | (SEQ ID NO: 229) |
| V48 | LV-105 | GACATCCAGATGACCCAGTCTCCATCTTCCGTGTCTGCATCTGTAGG |
| | | AGACAGAGTCACCATCACTTGTCGGGCGAGTCAGGGTATTAGCAGC |
| | | TGGTTAGCCTGGTATCAGCAGAAACCAGGGAAAGCCCCTAAGCTCC |
| | | TGATCTATGCTGCATCCAGTTTGCAAACGGGGGTCCCATCAAGGTTC |
| | | AGCGGCAGTGGATCTGGGACAGATTTCACTCTCACCATCAGCAGCCT |
| | | GCAGCCTGAAGATTTTGCAACTTACTTTTGTCAACAGGCTGACAGTT |
| | | TGCCTCGCACTTTTGGCCAGGGGACCAAGCTGGAGATCAAA |
| | | (SEQ ID NO: 230) |
| V49 | LV-106 | GACATCCAGATGACCCAGTCTCCATCTTCCGTGTCTGCATCTGTAGG |
| | | AGACAGAGTCACCATCACTTGTCGGGCGAGTCAGGGTATTAGCAGC |
| | | TGGTTAGCCTGGTATCAGCAGAAACCAGGGAAAGCCCCTAAGCTCC |
| | | TGATCTATGCTGCATCCAGTCGGCAAAATGGGGTCCCATCAAGGTTC |
| | | AGCGGCAGTGGATCTGGGACAGATTTCACTCTCACCATCAGCAGCCT |
| | | GCAGCCTGAAGATTTTGCAACTTACTTTTGTCAACAGGCTGACAGTT |
| | | ATCCTCGCACTTTTGGCCAGGGGACCAAGCTGGAGATCAAA |
| | | (SEQ ID NO: 231) |
| V52 | LV-107 | GACATCCAGATGACCCAGTCTCCATCTTCCGTGTCTGCATCTGTAGG |
| | | AGACAGAGTCACCATCACTTGTCGGGCGAGTCAGGGTATTAGCAGC |
| | | TGGTTAGCCTGGTATCAGCAGAAACCAGGGAAAGCCCCTAAGCTCC |
| | | TGATCTATGCTGCATCCAGTTTGCAAAGGGGGGTCCCATCAAGGTTC |
| | | AGCGGCAGTGGATCTGGGACAGATTTCACTCTCACCATCAGCAGCCT |
| | | GCAGCCTGAAGATTTTGCAACTTACTTTTGTCAACAGGCTGACCGTT |
| | | TCCCTCGCACTTTTGGCCAGGGGACCAAGCTGGAGATCAAA |
| | | (SEQ ID NO: 232) |
| V60 | LV-108 | GACATCCAGATGACCCAGTCTCCATCTTCCGTGTCTGCATCTGTAGG |
| | | AGACAGAGTCACCATCACTTGTCGGGCGAGTCAGGGTATTAGCAGC |
| | | TGGTTAGCCTGGTATCAGCAGAAACCAGGGAAAGCCCCTAAGCTCC |
| | | TGATCTATGCTGCATCCAGTTTGCAAAGGGGGGTCCCATCAAGGTTC |
| | | AGCGGCAGTGGATCTGGGACAGATTTCACTCTCACCATCAGCAGCCT |
| | | GCAGCCTGAAGATTTTGCAACTTACTTTTGTGGGCAGGCTGACAGTT |
| | | TCCCTCGCACTTTTGGCCAGGGGACCAAGCTGGAGATCAAA |
| | | (SEQ ID NO: 233) |
| V73 | LV-106 | GACATCCAGATGACCCAGTCTCCATCTTCCGTGTCTGCATCTGTAGG |
| | | AGACAGAGTCACCATCACTTGTCGGGCGAGTCAGGGTATTAGCAGC |
| | | TGGTTAGCCTGGTATCAGCAGAAACCAGGGAAAGCCCCTAAGCTCC |
| | | TGATCTATGCTGCATCCAGTCGTCAAAATGGGGTCCCATCAAGGTTC |
| | | AGCGGCAGTGGATCTGGGACAGATTTCACTCTCACCATCAGCAGCCT |
| | | GCAGCCTGAAGATTTTGCAACTTACTTTTGTCAACAGGCTGACAGTT |
| | | ATCCTCGCACTTTTGGCCAGGGGACCAAGCTGGAGATCAAA |
| | | (SEQ ID NO: 234) |
| V76 | LV-109 | GACATCCAGATGACCCAGTCTCCATCTTCCGTGTCTGCATCTGTAGG |
| | | AGACAGAGTCACCATCACTTGTCGGGCGAGTCAGGGTATTAGCAGC |
| | | TGGTTAGCCTGGTATCAGCAGAAACCAGGGAAAGCCCCTAAGCTCC |
| | | TGATCTATGCTGCATCCAGTTTGCAAAAGGGGGTCCCATCAAGGTTC |
| | | AGCGGCAGTGGATCTGGGAGAGATTTCACTCTCACCATCAGCAGCCT |
| | | GCAGCCTGAAGATTTTGCAACTTACTTTTGTCAACAGGCTGACAGTT |
| | | TCCCTCGCACTTTTGGCCAGGGGACCAAGCTGGAGATCAAA |
| | | (SEQ ID NO: 235) |
| V84 | LV-110 | GACATCCAGATGACCCAGTCTCCATCTTCCGTGTCTGCATCTGTAGG |
| | | AGACAGAGTCACCATCACTTGTCGGGCGAGTCAGGGTATTAGCAGC |
| | | TGGTTAGCCTGGTATCAGCAGAAACCAGGGAAAGCCCCTAAGCTCC |
| | | TGATCTATGGTGCATCCAGTTTGCAAAATGGGGTCCCATCAAGGTTC |
| | | AGCGGCAGTGGATCTGGGACAGATTTCACTCTCACCATCAGCAGCCT |
| | | GCAGCCTGAAGATTTTGCAACTTACTTTTGTCAACAGGCTGACAGTT |
| | | TCCCGCGCACTTTTGGCCAGGGGACCAAGCTGGAGATCAAA |
| | | (SEQ ID NO: 236) |
| V10 | LV-201 | GACATCCAGATGACCCAGTCTCCATCTTCCGTGTCTGCATCTGTAGG |
| | | AGACAGAGTCACCATCACTTGTCGGGCGAGTCAGGGTATTAGCAGC |
| | | TGGTTAGCCTGGTATCAGCAGAAACCAGGGAAAGCCCCTAAGCTCC |
| | | TGATCTATTCTGCATCCAGTTTGCAAAATGGGGTCCCATCAAGGTTC |
| | | AGCGGCAGTGGATCTGGGACAGATTTCACTCTCACCATCAGCAGCCT |
| | | GCAGCCTGAAGATTTTGCAACTTACTTTTGTCAACAGGCTGACAGTT |
| | | TCCCTCGCACTTTTGGCCAGGGGACCAAGCTGGAGATCAAA |
| | | (SEQ ID NO: 313) |
| V23 | LV-202 | GACATCCAGATGACCCAGTCTCCATCTTCCGTGTCTGCATCTGTAGG |
| | | AGACAGAGTCACCATCACTTGTCGGGCGAGTCAGGGTATTAGCAGC |
| | | TGGTTAGCCTGGTATCAGCAGAAACCAGGGAAAGCCCCTAAGCTCC |
| | | TGATCTATGCTGCATCCAGTTTGCAAAATGGGGTCCCATCAAGGTTC |
| | | AGCGGCAGTGGATCTGGGACAGATTTCACTCTCACCATCAGCAGCCT |
| | | GCAGCCTGAAGATTTTGCAACTTACTTTTGTCAACAGGCTGACAGTT |
| | | TCCCTCTTACTTTTGGCCAGGGGACCAAGCTGGAGATCAAA |
| | | (SEQ ID NO: 314) |
| V57 | LV-203 | GACATCCAGATGACCCAGTCTCCATCTTCCGTGTCTGCATCTGTAGG |
| | | AGACAGAGTCACCATCACTTGTGCGGCGAGTCAGGGTATTAGCAGC |
| | | TGGTTAGCCTGGTATCAGCAGAAACCAGGGAAAGCCCCTAAGCTCC |
| | | TGATCTATGCTGCATCCAGTTTGCAAAATGGGGTCCCATCAAGGTTC |
| | | AGCGGCAGTGGATCTGGGACAGATTTCACTCTCACCATCAGCAGCCT |
| | | GCAGCCTGAAGATTTTGCAACTTACTTTTGTCAACAGGCTGACAGTT |
| | | TCCCTCGCACTTTTGGCCAGGGGACCAAGCTGGAGATCAAA |
| | | (SEQ ID NO: 315) |
| V70 | LV-204 | GACATCCAGATGACCCAGTCTCCATCTTCCGTGTCTGCATCTGTAGG |
| | | AGACAGAGTCACCATCACTTGTCGGGCGAGTCAGGGTATTAGCAGC |
| | | TGGTTAGCCTGGTATCAGCAGAAACCAGGGAAAGCCCCTAAGCTCC |
| | | TGATCTATGCTGCAGGGAGTTTGCAAAATGGGGTCCCATCAAGGTTC |
| | | AGCGGCAGTGGATCTGGGACAGATTTCACTCTCACCATCAGCAGCCT |
| | | GCAGCCTGAAGATTTTGCAACTTACTTTTGTCAACAGGCTGACAGTT |
| | | TCCCTCGCACTTTTGGCCAGGGGACCAAGCTGGAGATCAAA |
| | | (SEQ ID NO: 316) |
| V83 | LV-205 | GACATCCAGATGACCCAGTCTCCATCTTCCGTGTCTGCATCTGTAGG |
| | | AGACAGAGTCACCATCACTTGTCGGGCGAGTCAGGGTATTAGCAGC |
| | | TGGTTAGCCTGGTATCAGCAGAAACCAGGGAAAGCCCCTAAGCTCC |
| | | TGATCTATGCTGCATCCAGTTTGCAAAATGGGGTCCCATCAAGGTTC |
| | | AGCGGCAGTGGATCTGGGACAGATTTCACTCTCACCATCAGCAGCCT |
| | | GCAGCCTGAAGATTTTGCAACTTACTTTTGTCAACAGGCTGTGAGTT |
| | | TCCCTCGCACTTTTGGCCAGGGGACCAAGCTGGAGATCAAA |
| | | (SEQ ID NO: 317) |
| V90 | LV-206 | GACATCCAGATGACCCAGTCTCCATCTTCCGTGTCTGCATCTGTAGG |
| | | AGACAGAGTCACCATCACTTGTCGGGCGAGTCAGGGTATTAGCAGA |
| | | TGGTTAGCCTGGTATCAGCAGAAACCAGGGAAAGCCCCTAAGCTCC |
| | | TGATCTATGCTGCATCCAGTTTGCAAAATGGGGTCCCATCAAGGTTC |
| | | AGCGGCAGTGGATCTGGGACAGATTTCACTCTCACCATCAGCAGCCT |
| | | GCAGCCTGAAGATTTTGCAACTTACTTTTGTCAACAGGCTGACAGTT |
| | | TCCCTCGCACTTTTGGCCAGGGGACCAAGCTGGAGATCAAA |
| | | (SEQ ID NO: 318) |

Heavy chain variable regions

| | | |
|---|---|---|
| 12G10 | HV-01 | GAGGTGCAGCTGTTGGAGTCTGGGGGAGGCTTGGTACAGCCTGGGG |
| 24C12 | | GGTCCCTGAGACTCTCCTGTGCAGCCTCTGGATTCACCTTTAGCAGC |
| | | TATGCCATGAGCTGGGTCCGCCAGGCTCCAGGGAAGGGGCTGGAGT |
| | | GGGTCTCAGCTATTGGTGGTGGTGGTGTTAGCACATACTGCGCAGAC |
| | | TCCGTGAAGGGCCGGTTCACCATCTCCAGAGACAATTCCAAGAATA |
| | | CGCTGTATCTGCAAATGAACAGCCTGAGAGCCGAGGACACGGCCGT |
| | | ATATTACTGTGCGAAATTTTATATAGCAGTGGCTGGTTCTCACTTTG |
| | | ACTACTGGGGCCAGGGAACCCTGGTCACCGTCTCCTCA |
| | | (SEQ ID NO: 237) |
| 26A10 | HV-02 | GAGGTGCAACTGGTGGAGTCTGGGGGAGCCTTGGTACAGCGGGGGG |
| | | GGTCCCTGAGACTCTCCTGTGCAGCCTCTAGATTCACCTTCAGTAGC |
| | | TTTGGCATGAGCTGGGTCCGCCAGGCTCCAGGGAAGGGGCTGGAGT |
| | | GGGTTTCATACATTAGTAGTAGTAGTTTTACCATATATTACGCAGAC |
| | | TCTGTGAAGGGCCGATTCACCATCTCCAGAGACAATGCCAAGAATTC |
| | | ATTCTATCTGCAAATGAACAGCCTGAGAGACGAGGACACGGCTGTG |
| | | TATTACTGTGCGAGAGAGGGGGGTCTTACTATGGTTCGGGGAGTCTC |
| | | TTCCTACGGTTTGGACGTCTGGGGCCAAGGGACCACGGTCACCGTCT |
| | | CCTCA (SEQ ID NO: 238) |
| 26C10 | HV-03 | GAGGTGCAACTGGTGGAGTCTGGGGGAGCCTTGGTACAGCCTGGGG |
| | | GGTCCCTGAGACTCTCCTGTGCAGCCTCTGGATTCACCTTCAGTAGC |
| | | TTTGGCATGAGCTGGGTCCGCCAGGCTCCAGGGAAGGGGCTGGAGT |
| | | GGGTTTCATACATTAGTAGTAGTAGTTTTACCATATACTACGCAGAC |
| | | TCTGTGAAGGGCCGATTCACCATCTCCAGAGACAATGCCAAGAATTC |
| | | GTTCTATCTGCAAATGAACAGCCTGAGAGACGAGGACACGGCTGTG |
| | | TATTTCTGTGTGAGAGAGGGGGGTATAACTATGGTTCGGGGAGTCTC |
| | | TTCCTACGGTATGGACGTCTGGGGCCAAGGGACCACGGTCACCGTCT |
| | | CCTCA (SEQ ID NO: 239) |
| 26F2 | HV-04 | GAGGTGCAACTGGTGGAGTCTGGGGGAGCCTTGGTACAGCCTGGGG |
| | | GGTCCCTGAGACTCTCCTGTGCAGCCTCTGGATTCACCTTCAGTAGC |
| | | TTTGGCATGAGCTGGGTCCGCCAGGCTCCAGGGAAGGGGCTGGAGT |
| | | GGATTTCATACATTAGTAGTAGTAGTTTTACCATATACTACGCAGAC |
| | | TCTGTGAAGGGCCGATTCACCATCTCCAGAGACAATGCCAAGAATTC |
| | | ATTCTATCTGCAAATGAACAGCCTGAGAGACGAGGACACGGCTGTG |
| | | TATTTCTGTGCGAGAGAGGGGGGTATTACTATGGTTCGGGGAGTCTC |
| | | TTCCTACGGTATGGACGTCTGGGGCCAAGGGACCACGGTCACCGTCT |
| | | CCTCA (SEQ ID NO: 240) |
| 33B12 | HV-05 | GAGGTGCAACTGGTGGAGTCTGGGGGAGCCTTGGTACAGCCTGGGG |
| | | GGTCCCTGAGACTCTCCTGTGCAGCCTCTGGATTCACCTTCAGTAGC |
| | | TTTGGCATGAGCTGGGTCCGCCAGGCTCCAGGGAAGGGCCTGGAGT |
| | | GGGTTTCATACATTAGTAAAAGTAGTTTTACCATATACTACGCAGAC |
| | | TCTGTGAAGGGCCGATTCACCATCTCCAGAGACAATGCCAAGAATTC |
| | | ATTCTATCTGCAAATGAACAGCCTGAGAGACGAGGACACGGCTGTG |
| | | TATTACTGTGCGAGAGAGGGGGGTCTTACTATGGTTCGGGGAGTCTC |
| | | TTCCTACGGTTTGGACGTCTGGGGCCAAGGGACCACGGTCACCGTCT |
| | | CCTCA (SEQ ID NO: 241) |
| 24G6 | HV-06 | GAGGTGCAGCTGTTGGAGTCTGGGGGAGGCTTGGTACAGCCTGGGG |
| | | GGTCCCTGAGACTCTCCTGTGCAGCCTCTGGATTCACCTTTAGCAGC |
| | | TATGCCATGAGCTGGGTCCGCCAGGCTCCAGGGAAGGGACTGGAGT |
| | | GGGTCTCAGCTATTAGTGGTAGTGGTGGTAGCACATACTACGCAGAC |
| | | TCCGTGAAGGGCCGGTTCACCATCTCCAGAGACAATTCCAAGAACA |
| | | CGCTGTATCTGCAAATGAACAGCCTGAGAGCCGAGGACACGGCCGT |
| | | ATATTACTGTGCGAAGGCGTATACACCTATGGCATTCTTTGACTACT |
| | | GGGGCCAGGGAACCCTGGTCACCGTCTCCTCA (SEQ ID NO: 242) |
| 24A10 | HV-07 | GAGGTGCAGGTGTTGGAGTCTGGGGGAGGCTTGGTACAGCCTGGGG |
| | | GGTCCCTGAGACTCTCCTGTGCAGCCTCTGGATTCACCTTTAGCAAC |
| | | TATGCCATGAGCTGGGTCCGCCAGGCTCCAGGGAAGGGGCTGGAGT |
| | | GGGTCTCAGCTATTAGTGGTAGTGGTGGTAGCACATACTACGCAGAC |
| | | TCCGTGAAGGGCCGGTTCACCATCTCCAGAGACAATTCCAAGAACA |
| | | CGCTGTATCTGCAAATGAACAGCCTGAGAGCCGAGGACACGGCCGT |
| | | ATATTACTGTGCGAAAGGAGGGTGGGAGCTATTTTACTGGGGCCAG |
| | | GGAACCCTGGTCACCGTCTCCTCA (SEQ ID NO: 243) |
| 10E3 | HV-08 | GAGGTGCAGCTGGTGCAGTCTGGAGCAGAGGTGAAAAAGCCCGGGG |
| | | AGTCTCTGATGATCTCCTGTAAGGGTTCTGGATACAGCTTTACCAAC |
| | | TACTGGATCGGCTGGGTGCGCCAGATGCCCGGGAAAGGCCTGGAGT |
| | | GGATGGGGATCATCTATCCTGGAGACTCTGATACCAGATACAGCCC |
| | | GTCCTTCCAAGGCCAGGTCACCATCTCAGCCGACAAGTCCATCAGCA |
| | | CCGCCTACCTGCAGTGGAGCAGCCTGAAGGCCTCGGACACCGCCAT |
| | | GTATTTCTGTGCGAGACGGAGACAGGGGATCTGGGGTGATGCTCTTG |
| | | ATATCTGGGGCCAAGGGACATTGGTCACCGTCTCTTCA |
| | | (SEQ ID NO: 244) |
| 13E7 | HV-09 | GAGGTGCAGCTGGTGCAGTCTGGAGCAGAGGTGAAAAAGCCCGGGG |
| | | AGTCTCTGATGATCTCCTGTAAGGGTTCTGGATACAGCTTTACCAGC |
| | | TACTGGATCGGCTGGGTGCGCCAGATGCCCGGGAAAGGCCTGGAGT |
| | | GGATGGGGATCATCTATCCTGGAGACTCTGATACCAGATACAGCCC |
| | | GTCCTTCCAAGGCCAGGTCACCATCTCAGCCGACAAGTCCATCAGCA |
| | | CCGCCTACCTGCAGTGGAGCAGCCTGAAGGCCTCGGACACCGCCAT |
| | | GTATTTCTGTGCGAGACGGAGACAGGGGATCTGGGGTGATGCTCTTG |
| | | ATTTCTGGGGCCAAGGGACATTGGTCACCGTCTCTTCA |
| | | (SEQ ID NO: 245) |
| 25F12 | HV-10 | CAGGTGCAGCTACAGCAGTGGGGCGCAGGACTGTTGAAGCCTTCGG |
| | | AGACCCTGTCCCTCACCTGCGCTGTCTATGGTGGGTCCTTCAGTAGT |
| | | TACTACTGGAGCTGGATCCGCCAGCCCCCAGGGAAGGGGCTGGAGT |
| | | GGATTGGGGAAATCAATCATAGTGGAAACACCAACTACAACCCGTC |
| | | CCTCAAGAGTCGAGTCACCATATCAGTAGACACGTCCAAGAACCAG |
| | | TTCTCCCTGAAGCTGAGCTCTGTGACCGCCGCGGACACGGCTGTGTA |
| | | TTACTGTGCGAGAGAGGGGTATTACGATATCTTGACTGGTTATCATG |
| | | ATGCTTTTGATATTTGGGACCAAGGGACAATGGTCACCGTNTTTTCA |
| | | (SEQ ID NO: 246) |
| 32E3 | HV-11 | GAGGTGCAGCTGGTGCAGTCTGGAGCAGAGGTGAAAAAGCCCGGGG |
| | | AGTCTCTGAAGATCTCCTGTAAGGGTTCTGGATACAGCTTTACCAGC |
| | | TACTGGATCGGCTGGGTGCGCCAGATGCCCGGGAAAGGCCTGGAGT |
| | | GGATGGGGATCATCTATCCTGGTGACTCTGATACCAGATACAGCCCG |
| | | TCCTTCCAAGGCCAGGTCACCATCTCAGCCGACAAGTCCATCAGCAC |
| | | CGCCTACCTGCAGTGGAGCACCCTGAAGGCCTCGGACACCGCCATA |
| | | TATTACTGTGCGCGACATGACATTATACCAGCAGCCCCTGGTGCTTT |
| | | TGATATCTGGGGCCAAGGGACAATGGTCACCGTCTCTTCA |
| | | (SEQ ID NO: 247) |
| 24F4 | HV-12 | GAGGTGCAGCTGGTGCAGTCTGGAGCAGAGGTGAAAAAGCCCGGGG |
| | | AGTCTCTGAAGATCTCCTGTAAGGGTTCTGGATACACCTTTACCAGC |
| | | TACTGGATCGGCTGGGTGCGCCAGATGCCCGGGAAAGGCCTGGAGT |
| | | GGATGGGGATCATCTATCCTGGTGACTCTGATACCAGATACAGCCCG |
| | | TCCTTCCAAGGCCAGGTCACCATCTCAGTCGACAAGTCCAGCAGCAC |
| | | CGCCTACCTGCAGTGGAGCAGCCTGAAGGCCTCGGACACCGCCATA |
| | | TATTACTGTACGAGACAGGCCATAGCAGTGACTGGTTTGGGGGGTTT |
| | | CGACCCCTGGGGCCAGGGAACCCTGGTCACCGTCTCCTCA |
| | | (SEQ ID NO: 248) |
| 16B8 | HV-13 | CAGGTTCAGCTGGTGCAGTCTGGAGCTGAGGTGAAGAAGCCTGGGG |
| | | CCTCAGTGAAGGTCTCCTGCAAGGCTTCTGGTTACACCTTTACCAAC |
| | | TATGGTATCAGCTGGGTGCGACAGGCCCCTGGACAAGGGCTTGAGT |
| | | GGATGGGATGGATCAGCGCTTACAATGGTAACACAAACTATGCACA |
| | | GAAGCTCCAGGGCAGAGTCACCATGACCACAGACACATCCACGAGT |
| | | ACAGTCTACATGGAGCTGAGGAGCCTGAGATCTGACGACACGGCCG |
| | | TGTATTACTGTGCGAGACGGGGATACAGCTATGGTTCCTTTGACTAC |
| | | TGGGGCCAGGGAACCCTGGTCACCGTCTCCTCA (SEQ ID NO: 249) |
| 4C5 | HV-14 | GAGGTGCAGCTGGTGCAGTCTGGAGCAGAAGTGAAAAAGCCCGGGG |
| | | AGTCTCTGAAGATCTCCTGTAAGGGTTCTGGACACAGTTTTACCAAC |
| | | TACTGGATCGCCTGGGTGCGCCAGATGCCCGGGAAAGGCCTGGAGT |
| | | GGATGGGGATCATCTATCCTGGTGACTCTGATACCAGATACAGCCCG |
| | | TCCTTCCAAGGCCAGGTCACCATCTCAGCCGACAAGTCCATCAGCAC |
| | | CGCCTACCTGCAGTGGAGCAGCCTGAAGGCCTCGGACACCGCCGTG |
| | | TATTTCTGTGCGAGACAAAGGACGTTTTACTATGATAGTAGTGGTTA |
| | | TTTTGACTACTGGGGCCAGGGAACCCTGGTCACCGTCTCCTCA |
| | | (SEQ ID NO: 250) |
| 6E7 | HV-15 | GAGGTGCAGCTGGTGCAGTCTGGAGCAGAGGTGAAAAAGCCCGGGG |
| | | AGTCTCTGAAGATCTCCTGTAAGGGTTCTGGATACAGTTTTACCAGC |
| | | TACTGGATCGCCTGGGTGCGCCAGATGCCCGGGAAAGGCCTGGAGT |
| | | GGATGGGGATCATCTATCCTGGTGACTCTGATACCAGATACAGCCCG |
| | | TCCTTCCAAGGCCAGGTCACCATCTCAGCCGACAAGTCCATCAGCAC |
| | | CGCCTACCTACAGTGGAGCAGCCTGAAGGCCTCGGACACCGCCATG |
| | | TATTTCTGTGCGAGACAAAGGACGTTTTATTATGATAGTAGTGATTA |
| | | TTTTGACTACTGGGGCCAGGGAACCCTGGTCACCGTCTCCTCA |
| | | (SEQ ID NO: 251) |
| 5E3 | HV-16 | CAGGTGCAGCTGGTGCAGTCTGGGGCTGAGGTGAAGAAGCCTGGGG |
| | | CCTCAGTGAAGGTCTCCTGCAAGGCTTCTGGATACACCTTCACCGGC |
| | | TACTATATACACTGGGTGCGACAGGCCCCTGGACTAGGGCTTGAGTG |
| | | GATGGGATGGATCAACCCTTACAGTGGTGGCACAACCTCTGCACAG |
| | | AAGTTTCAGGGCAGGGTCACCATGACCAGGGACACGTCCATCAGCT |
| | | CAGCCTACATGGAACTGAGCAGGCTGAGATCTGACGACACGGCCGT |
| | | GTATTACTGTGCGAGAGATGGAGGCTACCTGGCCCTCTACGGTACGG |
| | | ACGTCTGGGGCCAAGGGACCACGGTCACCGTCTCCTCA |
| | | (SEQ ID NO: 252) |
| 4G10 | HV-17 | GAGGTGCAGCTGGTGCAGTCTGGAGCAGAGGTGAAAAAGCCCGGGG |
| | | AGTCTCTGAAGATCTCCTGTAAGGGTTCTGGATACAGCTTTCCCAGC |
| | | TACTGGATCGCCTGGGTGCGCCAGATGCCCGGGAAAGGCCTGGAGT |
| | | GGATGGGGATCATCTATCCTGGTGACTCTGATACCAGATACAGCCCG |
| | | TCCTTCCAAGGCCAGGTCACCATCTCAGCCGACAAGTCCATCAGCAC |
| | | CGCCTTTTTGAAGTGGAGTAGCCTGAAGGCCTCGGACACCGCCATGT |
| | | ATTTCTGTGCGCGACAGGGTATAGAAGTGACTGGTACGGGAGGTTT |
| | | GGACGTCTGGGGCCAAGGGACCACGGTCACCGTCTCCTCA |
| | | (SEQ ID NO: 253) |
| V3 | HV-101 | GAGGTGCAGCTGGTGCAGTCTGGAGCAGAGGTGAAAAAGCCCGGGG |
| | | AGTCTCTGAAGATCTCCTGTAAGGGTTCTGGATACAGTTTTGCGAGC |
| | | TACTGGATCGCCTGGGTGCGCCAGATGCCCGGGAAAGGCCTGGAGT |
| | | GGATGGGGATCATCTATCCTGGTGACTCTGATACCAGATACAGCCCG |
| | | TCCTTCCAAGATCAGGTCACCATCTCAGCCGACAAGTCCATCAGCAC |
| | | CGCCTACCTACAGTGGAGCAGCCTGAAGGCCTCGGACACCGCCATG |
| | | TATTTCTGTGCGAGAGGGAGGACGTTTTATTATGATAGTAGTGATTA |
| | | TTTTGACTACTGGGGCCAGGGAACCCTGGTCACCGTGTCCTCA |
| | | (SEQ ID NO: 254) |
| V24 | HV-102 | GAGGTGCAGCTGGTGCAGTCTGGAGCAGAGGTGAAAAAGCCCGGGG |
| | | AGTCTCTGAAGATCTCCTGTAAGGGTTCTGGATACAGTTTTACCAGC |
| | | TACTGGATTGCCTGGGTGCGCCAGATGCCCGGGAAAGGCCTGGAGT |
| | | GGATGGGGATCATCTATCCTGGTGACTCTGATGTGAGATACAGCCCG |
| | | TCCTTCCAAGGCCAGGTCACCATCTCAGCCGACAAGTCCATCAGCAC |
| | | CGCCTACCTACAGTGGAGCAGCCTGAAGGCCTCGGACACCGCCATG |
| | | TATTTCTGTGCGAGATCTAGGACGTTTTATTATGATAGTAGTGATTAT |
| | | TTTGACTACTGGGGCCAGGGAACCCTGGTCACCGTGTCCTCA |
| | | (SEQ ID NO: 255) |
| V27 | HV-103 | GAGGTGCAGCTGGTGCAGTCTGGAGCAGAGGTGAAAAAGCCCGGGG |
| | | AGTCTCTGAAGATCTCCTGTAAGGGTTCTGGATACAGTTTTACCAGC |
| | | TACTGGATCGCCTGGGTGCGCCAGATGCCCGGGAAAGGCCTGGAGT |
| | | GGATGGGGATCATCTATCCTGGTGACTCTGATACCAGATACGCTCCG |
| | | TCCTTCCAAGGCCAGGTCACCATCTCAGCCGACAAGTCCATCAGCAC |
| | | CGCCTACCTACAGTGGAGCAGCCTGAAGGCCTCGGACACCGCCATG |
| | | TATTTCTGTGTGAGAAGTAGGACGTTTTATTATGATAGTAGTGATTA |
| | | TTTTGACTACTGGGGCCAGGGAACCCTGGTCACCGTGTCCTCA |
| | | (SEQ ID NO: 256) |
| V40 | HV-104 | GAGGTGCAGCTGGTGCAGTCTGGAGCAGAGGTGAAAAAGCCCGGGG |
| | | AGTCTCTGAAGATCTCCTGTAAGGGTTCTGGATACAGTTTTGGGAGC |
| | | TACTGGATCGCCTGGGTGCGCCAGATGCCCGGGAAAGGCCTGGAGT |
| | | GGATGGGGATCATCTATCCTGGTGACTCTGATGTTAGATACAGCCCG |
| | | TCCTTCCAAGGCCAGGTCACCATCTCAGCCGACAAGTCCATCAGCAC |
| | | CGCCTACCTACAGTGGAGCAGCCTGAAGGCCTCGGACACCGCCATG |
| | | TATTTCTGTGCGAGACAAAGGACGTTTTATTATGATAGTAGTGATTA |
| | | TTCGGACTACTGGGGCCAGGGAACCCTGGTCACCGTGTCCTCA |
| | | (SEQ ID NO: 257) |
| V48 | HV-105 | GAGGTGCAGCTGGTGCAGTCTGGAGCAGAGGTGAAAAAGCCCGGGG |
| | | AGTCTCTGAAGATCTCCTGTAAGGGTTCTGGATACAGTTTTGGTAGC |
| | | TACTGGATCGCCTGGGTGCGCCAGATGCCCGGGAAAGGCCTGGAGT |
| | | GGATGGGGATCATCTATCCTGGTGACTCTGATGTGAGATACAGCCCG |
| | | TCCTTCCAAGGCCAGGTCACCATCTCAGCCGACAAGTCCATCAGCAC |
| | | CGCCTACCTACAGTGGAGCAGCCTGAAGGCCTCGGACACCGCCATG |
| | | TATTTCTGTGCGAGAATGAGGACGTTTTATTATGATAGTAGTGATTA |
| | | TTTTGACTACTGGGGCCAGGGAACCCTGGTCACCGTGTCCTCA |
| | | (SEQ ID NO: 258) |
| V49 | HV-106 | GAGGTGCAGCTGGTGCAGTCTGGAGCAGAGGTGAAAAAGCCCGGGG |
| | | AGTCTCTGAAGATCTCCTGTAAGGGTTCTGGATACAGTTTTAATAGC |
| | | TACTGGATCGCCTGGGTGCGCCAGATGCCCGGGAAAGGCCTGGAGT |
| | | GGATGGGGACGATCTATCCTGGTGACTCTGATACCAGACTGAGCCC |
| | | GTCCTTCCAAGGCCAGGTCACCATCTCAGCCGACAAGTCCATCAGCA |
| | | CCGCCTACCTACAGTGGAGCAGCCTGAAGGCCTCGGACACCGCCAT |
| | | GTATTTCTGTGCGAGAAGTAGGACGTTTTATTATGATAGTAGTGATT |
| | | ATTTTGACTACTGGGGCCAGGGAACCCTGGTCACCGTGTCCTCA |
| | | (SEQ ID NO: 259) |
| V52 | HV-107 | GAGGTGCAGCTGGTGCAGTCTGGAGCAGAGGTGAAAAAGCCCGGGG |
| | | AGTCTCTGAAGATCTCCTGTAAGGGTTCTGGATACAGTTTTGAGAGC |
| | | TACTGGATCGCCTGGGTGCGCCAGATGCCCGGGAAAGGCCTGGAGT |
| | | GGATGGGGATCATCTATCCTGGTGACTCTGATACCAGATACAGCCCG |
| | | TCCTTCCAAGGCCAGGTCACCATCTCAGCCGACAAGTCCATCAGCAC |
| | | CGCCTACCTACAGTGGAGCAGCCTGAAGGCCTCGGACACCGCCATG |
| | | TATTTCTGTGCGAGAGGGAGGACGTTTTATTATGATAGTAGTGATTA |
| | | TTTTGACTACTGGGGCCAGGGAACCCTGGTCACCGTGTCCTCA |
| | | (SEQ ID NO: 260) |
| V60 | HV-108 | GAGGTGCAGCTGGTGCAGTCTGGAGCAGAGGTGAAAAAGCCCGGGG |
| | | AGTCTCTGAAGATCTCCTGTAAGGGTTCTGGATACCATTTTACCAGC |
| | | TACTGGATCGCCTGGGTGCGCCAGATGCCCGGGAAAGGCCTGGAGT |
| | | GGATGGGGATCATCTATCCTGGTGACTCTGATGTGAGATACAGCCCG |
| | | TCCTTCCAAGGCCAGGTCACCATCTCAGCCGACAAGTCCATCAGCAC |
| | | CGCCTACCTACAGTGGAGCAGCCTGAAGGCCTCGGACACCGCCATG |
| | | TATTTCTGTGCGAGACAAAGGACGTTTTATTATGATAGTAGTGATTA |
| | | TAGTGACTACTGGGGCCAGGGAACCCTGGTCACCGTGTCCTCA |
| | | (SEQ ID NO: 261) |
| V73 | HV-109 | GAGGTGCAGCTGGTGCAGTCTGGAGCAGAGGTGAAAAAGCCCGGGG |
| | | AGTCTCTGAAGATCTCCTGTAAGGGTTCTGGATACAGTTTTGGTAGC |
| | | TACTGGATCGCCTGGGTGCGCCAGATGCCCGGGAAAGGCCTGGAGT |
| | | GGATGGGGATCATCTATCCTGGTGACTCTGATACCAGATACAGCCCG |
| | | GGGTTCCAAGGCCAGGTCACCATCTCAGCCGACAAGTCCATCAGCA |
| | | CCGCCTACCTACAGTGGAGCAGCCTGAAGGCCTCGGACACCGCCAT |
| | | GTATTTCTGTGCGAGAGGGAGGACGTTTTATTATGATAGTAGTGATT |
| | | ATTTTGACTACTGGGGCCAGGGAACCCTGGTCACCGTGTCCTCA |
| | | (SEQ ID NO: 262) |
| V76 | HV-110 | GAGGTGCAGCTGGTGCAGTCTGGAGCAGAGGTGAAAAAGCCCGGGG |
| | | AGTCTCTGAAGATCTCCTGTAAGGGTTCTGGATACAGTTTTGGGAGC |
| | | TACTGGATCGCCTGGGTGCGCCAGATGCCCGGGAAAGGCCTGGAGT |
| | | GGATGGGGATCATCTATCCTGGTGACTCTGATACCAGATACAGCCCG |
| | | GAGTTCCAAGGCCAGGTCACCATCTCAGCCGACAAGTCCATCAGCA |
| | | CCGCCTACCTACAGTGGAGCAGCCTGAAGGCCTCGGACACCGCCAT |
| | | GTATTTCTGTGCGAGACAAAGGACGTTTTATTATGATAGTAGTGATT |
| | | ATAGTGACTACTGGGGCCAGGGAACCCTGGTCACCGTGTCCTCA |
| | | (SEQ ID NO: 263) |
| V84 | HV-111 | GAGGTGCAGCTGGTGCAGTCTGGAGCAGAGGTGAAAAAGCCCGGGG |
| | | AGTCTCTGAAGATCTCCTGTAAGGGTTCTGGATACGGGTTTACCAGC |
| | | TACTGGATCGCCTGGGTGCGCCAGATGCCCGGGAAAGGCCTGGAGT |
| | | GGATGGGGATCATCTATCCTGGTGACAGTGATACCAGATACAGCCC |
| | | GTCCTTCCAAGGCCAGGTCACCATCTCAGCCGACAAGTCCATCAGCA |
| | | CCGCCTACCTACAGTGGAGCAGCCTGAAGGCCTCGGACACCGCCAT |
| | | GTATTTCTGTGCGAGACAAAGGACGTTTTATTATGATAGTAGTGATT |
| | | ATTCGGACTACTGGGGCCAGGGAACCCTGGTCACCGTGTCCTCA |
| | | (SEQ ID NO: 264) |
| V9 | HV-201 | GAGGTGCAGCTGGTGCAGTCTGGAGCAGAGGTGAAAAAGCCCGGGG |
| | | AGTCTCTGAAGATCTCCTGTAAGGGTTCTGGATACAGTTTTACCAGC |
| | | TACTGGATCGCCTGGGTGCGCCAGATGCCCGGGAAAGGCCTGGAGT |
| | | GGATGGGGATCATCTATCCTGGTGACTCTGATACCAGATACAGCCCG |
| | | TCCTTCCAAGGCCAGGTCACCATCTCAGCCGACAAGTCCATCAGCAC |
| | | CGCCTACCTACAGTGGAGCAGCCTGAAGGCCTCGGACACCGCCATG |
| | | TATTTCTGTGCGAGACAAAGGGGGTTTTATTATGATAGTAGTGATTA |
| | | TTTTGACTACTGGGGCCAGGGAACCCTGGTCACCGTGTCCTCA |
| | | (SEQ ID NO: 319) |
| V10 | HV-15 | GAGGTGCAGCTGGTGCAGTCTGGAGCAGAGGTGAAAAAGCCCGGGG |
| V23 | | AGTCTCTGAAGATCTCCTGTAAGGGTTCTGGATACAGTTTTACCAGC |
| V57 | | TACTGGATCGCCTGGGTGCGCCAGATGCCCGGGAAAGGCCTGGAGT |
| V70 | | GGATGGGGATCATCTATCCTGGTGACTCTGATACCAGATACAGCCCG |
| V83 | | TCCTTCCAAGGCCAGGTCACCATCTCAGCCGACAAGTCCATCAGCAC |
| | | CGCCTACCTACAGTGGAGCAGCCTGAAGGCCTCGGACACCGCCATG |
| | | TATTTCTGTGCGAGACAAAGGACGTTTTATTATGATAGTAGTGATTA |
| | | TTTTGACTACTGGGGCCAGGGAACCCTGGTCACCGTGTCCTCA |
| | | (SEQ ID NO: 320) |
| V30 | HV-202 | GAGGTGCAGCTGGTGCAGTCTGGAGCAGAGGTGAAAAAGCCCGGGG |
| | | AGTCTCTGAAGATCTCCTGTAAGGGTTCTGGATCGAGTTTTACCAGC |
| | | TACTGGATCGCCTGGGTGCGCCAGATGCCCGGGAAAGGCCTGGAGT |
| | | GGATGGGGATCATCTATCCTGGTGACTCTGATACCAGATACAGCCCG |
| | | TCCTTCCAAGGCCAGGTCACCATCTCAGCCGACAAGTCCATCAGCAC |
| | | CGCCTACCTACAGTGGAGCAGCCTGAAGGCCTCGGACACCGCCATG |
| | | TATTTCTGTGCGAGACAAAGGACGTTTTATTATGATAGTAGTGATTA |
| | | TTTTGACTACTGGGGCCAGGGAACCCTGGTCACCGTGTCCTCA |
| | | (SEQ ID NO: 321) |
| V33 | HV-203 | GAGGTGCAGCTGGTGCAGTCTGGAGCAGAGGTGAAAAAGCCCGGGG |
| | | AGTCTCTGAAGATCTCCTGTAAGGGTTCTGGATACAGTTTTACCAGC |
| | | TACTGGATCGCCTGGGTGCGCCAGATGCCCGGGAAAGGCCTGGAGT |
| | | GGATGGGGATCATCTATCCTGGTGACTCTGATACCAGATACAGCCCG |
| | | TCCTTCCAAGGCCAGGTCACCATCTCAGCCGACAAGTCCATCAGCAC |
| | | CGCCTACCTACAGTGGAGCAGCCTGAAGGCCTCGGACACCGCCATG |
| | | TATTTCTGTGCGAGACAAAGGACGTTTTATGGGGATAGTAGTGATTA |
| | | TTTTGACTACTGGGGCCAGGGAACCCTGGTCACCGTGTCCTCA |
| | | (SEQ ID NO: 322) |
| V44 | HV-204 | GAGGTGCAGCTGGTGCAGTCTGGAGCAGAGGTGAAAAAGCCCGGGG |
| | | AGTCTCTGAAGATCTCCTGTAAGGGTTCTGGATACAGTTTTACCAGC |
| | | TACTGGATCGCCTGGGTGCGCCAGATGCCCGGGAAAGGCCTGGAGT |
| | | GGATGGGGATCATCTATCCTAGTGACTCTGATACCAGATACAGCCCG |
| | | TCCTTCCAAGGCCAGGTCACCATCTCAGCCGACAAGTCCATCAGCAC |
| | | CGCCTACCTACAGTGGAGCAGCCTGAAGGCCTCGGACACCGCCATG |
| | | TATTTCTGTGCGAGACAAAGGACGTTTTATTATGATAGTAGTGATTA |
| | | TTTTGACTACTGGGGCCAGGGAACCCTGGTCACCGTGTCCTCA |
| | | (SEQ ID NO: 323) |
| V68 | HV-205 | GAGGTGCAGCTGGTGCAGTCTGGAGCAGAGGTGAAAAAGCCCGGGG |
| | | AGTCTCTGAAGATCTCCTGTAAGGGTTCTGGATACAGTTTTACCAGC |
| | | TACTGGATCGCCTGGGTGCGCCAGATGCCCGGGAAAGGCCTGGAGT |
| | | GGATGGGGATCATCTATCCTGGTGACTCTGATACCAGATACAGCCCG |
| | | TCCTTCCAAGGCCAGGTCACCATCTCAGCCGACAAGTCCATCAGCAC |
| | | CGCCTACCTACAGTGGAGCAGCCTGAAGGCCTCGGACACCGCCATG |
| | | TATTTCTGTGCGAGACAAAGGACGTTTAGGTATGATAGTAGTGATTA |
| | | TTTTGACTACTGGGGCCAGGGAACCCTGGTCACCGTGTCCTCA |
| | | (SEQ ID NO: 324) |
| V90 | HV-206 | GAGGTGCAGCTGGTGCAGTCTGGAGCAGAGGTGAAAAAGCCCGGGG |
| | | AGTCTCTGAAGATCTCCTGTAAGGGTTCTGGATACAGTTTTACCAGC |
| | | GAGTGGATCGCCTGGGTGCGCCAGATGCCCGGGAAAGGCCTGGAGT |
| | | GGATGGGGATCATCTATCCTGGTGACTCTGATACCAGATACAGCCCG |
| | | TCCTTCCAAGGCCAGGTCACCATCTCAGCCGACAAGTCCATCAGCAC |
| | | CGCCTACCTACAGTGGAGCAGCCTGAAGGCCTCGGACACCGCCATG |
| | | TATTTCTGTGCGAGACAAAGGACGTTTTATTATGATAGTAGTGATTA |
| | | TTTTGACTACTGGGGCCAGGGAACCCTGGTCACCGTGTCCTCA |
| | | (SEQ ID NO: 325) |

[0310] In some embodiments, an isolated nucleic acid encoding an anti-TREM2 antibody light chain variable region comprises a sequence that is at least 80% identical, at least 90% identical, at least 95% identical, or at least 98% identical to a sequence selected from SEQ ID NOS:208-236 and 313-318. In certain embodiments, an isolated nucleic acid encoding an anti-TREM2 antibody light chain variable region comprises a sequence selected from SEQ ID NOS:208-236 and 313-318. In related embodiments, an isolated nucleic acid encoding an anti-TREM2 antibody heavy chain variable region comprises a sequence that is at least 80% identical, at least 90% identical, at least 95% identical, or at least 98% identical to a sequence selected from SEQ ID NOS:237-264 and 319-325. In other related embodiments, an isolated nucleic acid encoding an anti-TREM2 antibody heavy chain variable region comprises a sequence selected from SEQ ID NOS:237-264 and 319-325.

[0311] In some embodiments, the polynucleotide encodes the full length light chain and full length heavy chain. Exemplary polynucleotide sequences are provided in TABLE A15.

[0312] B. U.S. Pat. No. 8,231,878

[0313] In some embodiments, the TREM2 agonist is antibody, or an antigen-binding fragment thereof, as described in U.S. Pat. No. 8,231,878, which is incorporated by reference herein, in its entirety. In some embodiments, the TREM2 antibody is monoclonal antibody 29E3, or a fragment, homologue, derivative or variant thereof.

[0314] In some embodiments, the TREM2 antigen bind protein comprises a CDRL1, CDRL2, and CDRL3 of the light chain variable region, and a CDRH1, CDRH2, and CDRH3 of the heavy chain variable region of monoclonal antibody 29E3. Monoclonal antibody 29E3 is further described in Bouchon et al., J Exp Med., 2001, 194(8):1111-1122.

[0315] In some embodiments, the TREM2 antigen bind protein comprises a light chain variable region and a heavy chain variable region of monoclonal antibody 29E3.

[0316] In some embodiments, the TREM2 antigen bind protein is a chimeric antibody containing the light chain variable region and the heavy chain variable region of monoclonal antibody 29E3, and a human heavy chain constant region, such as a human Fc region, or an engineered variant thereof.

[0317] In some embodiments, the TREM2 antigen bind protein, e.g., a TREM2 antibody, competes with binding of monoclonal antibody 29E3 to TREM2.

[0318] C. U.S. Patent Application Publication No. US2019/0010230A1

[0319] In some embodiments, the TREM2 agonist is an antibody, or an antigen-binding fragment thereof, as described in U.S. Patent Application Publication No. US2019/0010230A1 (“the '230 application”), which is incorporated by reference herein, in its entirety.

[0320] In some embodiments, the TREM2 binding agent comprises an antibody that comprises a light chain variable domain comprising a CDRL1, CDRL2, and CDRL3 (also referred to as HVR-L1, HVR-L2, and HVR-L3, respectively), and a heavy chain variable domain comprising a CDRH1, CDRH2, and CDRH3 (also referred to as HVR-H1, HVR-H2, and HVR-H3, respectively) disclosed in the '230 application specification. In some embodiments, the TREM2 binding agent comprises an antibody that comprises a light chain variable domain and a heavy chain variable domain disclosed in the '230 application specification.

[0321] In some embodiments, the antibody comprises a heavy chain variable domain and a light chain variable domain, wherein the heavy chain variable domain comprises the HVR-H1, HVR-H2, and/or HVR-H3 of the monoclonal antibody Ab52; and/or wherein the light chain variable domain comprises the HVR-L1, HVR-L2, and/or HVR-L3 of the monoclonal antibody Ab52. In some embodiments, the HVR-H1 comprises the amino acid sequence of SEQ ID NO:772. In some embodiments, the HVR-H2 comprises the amino acid sequence of SEQ ID NO:773. In some embodiments, the HVR-H3 comprises the amino acid sequence of SEQ ID NO:774. In some embodiments, the HVR-L1 comprises the amino acid sequence of SEQ ID NO:775. In some embodiments, the HVR-L2 comprises the amino acid sequence of SEQ ID NO:776. In some embodiments, the HVR-L3 comprises the amino acid sequence of SEQ ID NO:777. In some embodiments, the antibody comprises a heavy chain variable domain and a light chain variable domain, wherein the heavy chain variable domain comprises: (a) an HVR-H1 comprising the amino acid sequence of SEQ ID NO:772, or an amino acid sequence with at least about 95% homology to the amino acid sequence of SEQ ID NO:772; (b) an HVR-H2 comprising the amino acid sequence of SEQ ID NO:773, or an amino acid sequence with at least about 95% homology to the amino acid sequence of SEQ ID NO:773; and; and/or (c) an HVR-H3 comprising the amino acid sequence of SEQ ID NO:774, or an amino acid sequence with at least about 95% homology to the amino acid sequence of SEQ ID NO:774; and/or wherein the light chain variable domain comprises: (a) an HVR-L1 comprising the amino acid sequence of SEQ ID NO:775, or an amino acid sequence with at least about 95% homology to the amino acid sequence of SEQ ID NO:775; (b) an HVR-L2 comprising the amino acid sequence of SEQ ID NO:776, or an amino acid sequence with at least about 95% homology to the amino acid sequence of SEQ ID NO:776; and/or (c) an HVR-L3 comprising the amino acid sequence of SEQ ID NO:777, or an amino acid sequence with at least about 95% homology to the amino acid sequence of SEQ ID NO:777. In some embodiments, the antibody comprises a heavy chain variable domain and a light chain variable domain, wherein the heavy chain variable domain comprises the HVR-H1, HVR-H2, and/or HVR-H3 of the monoclonal antibody Ab21; and/or wherein the light chain variable domain comprises the HVR-L1, HVR-L2, and/or HVR-L3 of the monoclonal antibody Ab21. In some embodiments, the HVR-H1 comprises the amino acid sequence of SEQ ID NO:778. In some embodiments, the HVR-H2 comprises the amino acid sequence of SEQ ID NO:779. In some embodiments, the HVR-H3 comprises the amino acid sequence of SEQ ID NO:780. In some embodiments, the HVR-L1 comprises the amino acid sequence of SEQ ID NO:781. In some embodiments, the HVR-L2 comprises the amino acid sequence of SEQ ID NO:782. In some embodiments, the HVR-L3 comprises the amino acid sequence of SEQ ID NO:783. In some embodiments, the antibody comprises a heavy chain variable domain and a light chain variable domain, wherein the heavy chain variable domain comprises: (a) an HVR-H1 comprising the amino acid sequence of SEQ ID NO:778, or an amino acid sequence with at least about 95% homology to the amino acid sequence of SEQ ID NO:778; (b) an HVR-H2 comprising the amino acid sequence of SEQ ID NO:779, or an amino acid sequence with at least about 95% homology to the amino acid sequence of SEQ ID NO:779; and/or (c) an HVR-H3 comprising the amino acid sequence of SEQ ID NO:780, or an amino acid sequence with at least about 95% homology to the amino acid sequence of SEQ ID NO:780, and/or wherein the light chain variable domain comprises: (a) an HVR-L1 comprising the amino acid sequence of SEQ ID NO:781, or an amino acid sequence with at least about 95% homology to the amino acid sequence of SEQ ID NO:781; (b) an HVR-L2 comprising the amino acid sequence of SEQ ID NO:782, or an amino acid sequence with at least about 95% homology to the amino acid sequence of SEQ ID NO:782; and/or (c) an HVR-L3 comprising the amino acid sequence of SEQ ID NO:783, or an amino acid sequence with at least about 95% homology to the amino acid sequence of SEQ ID NO:783.

[0322] In some embodiments, the heavy chain variable domain comprises the HVR-H1, HVR-H2, and/or HVR-H3 of the monoclonal antibody Ab52; and/or wherein the light chain variable domain comprises the HVR-L1, HVR-L2, and/or HVR-L3 of the monoclonal antibody Ab52. In some embodiments, the HVR-H1 comprises the amino acid sequence of SEQ ID NO:772. In some embodiments, the HVR-H2 comprises the amino acid sequence of SEQ ID NO:773. In some embodiments, the HVR-H3 comprises the amino acid sequence of SEQ ID NO:774. In some embodiments, the HVR-L1 comprises the amino acid sequence of SEQ ID NO:775. In some embodiments, the HVR-L2 comprises the amino acid sequence of SEQ ID NO:776. In some embodiments, the HVR-L3 comprises the amino acid sequence of SEQ ID NO:777. In some embodiments, the antibody comprises a heavy chain variable domain and a light chain variable domain, wherein the heavy chain variable domain comprises an HVR-H1 comprising the amino acid sequence of SEQ ID NO:772, an HVR-H2 comprising the amino acid sequence of SEQ ID NO:773, and an HVR-H3 comprising the amino acid sequence of SEQ ID NO:774, and/or wherein the light chain variable domain comprises an HVR-L1 comprising the amino acid sequence of SEQ ID NO:775, an HVR-L2 comprising the amino acid sequence of SEQ ID NO:776, and an HVR-L3 comprising the amino acid sequence of SEQ ID NO:777.

[0323] In some embodiments, the heavy chain variable domain comprises: (a) an HVR-H1 comprising the amino acid sequence of SEQ ID NO:772, or an amino acid sequence with at least about 95% homology to the amino acid sequence of SEQ ID NO:772; (b) an HVR-H2 comprising the amino acid sequence of SEQ ID NO:773, or an amino acid sequence with at least about 95% homology to the amino acid sequence of SEQ ID NO:773; and; and/or (c) an HVR-H3 comprising the amino acid sequence of SEQ ID NO:774, or an amino acid sequence with at least about 95% homology to the amino acid sequence of SEQ ID NO:774; and/or wherein the light chain variable domain comprises: (a) an HVR-L1 comprising the amino acid sequence of SEQ ID NO:775, or an amino acid sequence with at least about 95% homology to the amino acid sequence of SEQ ID NO:775; (b) an HVR-L2 comprising the amino acid sequence of SEQ ID NO:776, or an amino acid sequence with at least about 95% homology to the amino acid sequence of SEQ ID NO:776; and/or (c) an HVR-L3 comprising the amino acid sequence of SEQ ID NO:777, or an amino acid sequence with at least about 95% homology to the amino acid sequence of SEQ ID NO:777.

[0324] In some embodiments, the heavy chain variable domain comprises the HVR-H1, HVR-H2, and/or HVR-H3 of the monoclonal antibody Ab21; and/or wherein the light chain variable domain comprises the HVR-L1, HVR-L2, and/or HVR-L3 of the monoclonal antibody Ab21. In some embodiments, the HVR-H1 comprises the amino acid sequence of SEQ ID NO:778. In some embodiments, the HVR-H2 comprises the amino acid sequence of SEQ ID NO:779. In some embodiments, the HVR-H3 comprises the amino acid sequence of SEQ ID NO:780. In some embodiments, the HVR-L1 comprises the amino acid sequence of SEQ ID NO:781. In some embodiments, the HVR-L2 comprises the amino acid sequence of SEQ ID NO:782. In some embodiments, the HVR-L3 comprises the amino acid sequence of SEQ ID NO:783. In some embodiments, the antibody comprises a heavy chain variable domain and a light chain variable domain, wherein the heavy chain variable domain comprises an HVR-H1 comprising the amino acid sequence of SEQ ID NO:778, an HVR-H2 comprising the amino acid sequence of SEQ ID NO:779, and an HVR-H3 comprising the amino acid sequence of SEQ ID NO:780, and/or wherein the light chain variable domain comprises an HVR-L1 comprising the amino acid sequence of SEQ ID NO:781, an HVR-L2 comprising the amino acid sequence of SEQ ID NO:782, and an HVR-L3 comprising the amino acid sequence of SEQ ID NO:783.

[0325] In some embodiments, the heavy chain variable domain comprises: (a) an HVR-H1 comprising the amino acid sequence of SEQ ID NO:778, or an amino acid sequence with at least about 95% homology to the amino acid sequence of SEQ ID NO:778; (b) an HVR-H2 comprising the amino acid sequence of SEQ ID NO:779, or an amino acid sequence with at least about 95% homology to the amino acid sequence of SEQ ID NO:779; and/or (c) an HVR-H3 comprising the amino acid sequence of SEQ ID NO:780, or an amino acid sequence with at least about 95% homology to the amino acid sequence of SEQ ID NO:780, and/or wherein the light chain variable domain comprises: (a) an HVR-L1 comprising the amino acid sequence of SEQ ID NO:781, or an amino acid sequence with at least about 95% homology to the amino acid sequence of SEQ ID NO:781; (b) an HVR-L2 comprising the amino acid sequence of SEQ ID NO:782, or an amino acid sequence with at least about 95% homology to the amino acid sequence of SEQ ID NO:782; and/or (c) an HVR-L3 comprising the amino acid sequence of SEQ ID NO:783, or an amino acid sequence with at least about 95% homology to the amino acid sequence of SEQ ID NO:783.

[0326] In some embodiments, the antibody comprises a heavy chain variable domain and a light chain variable domain, wherein the heavy chain variable domain comprises: (a) an HVR-H1 comprising an amino acid sequence selected from the group consisting of SEQ ID NOS:3-24, 772, and 778; an HVR-H2 comprising an amino acid sequence selected from the group consisting of SEQ ID NOS:25-49, 773, and 779; and (c) an HVR-H3 c comprising an amino acid sequence selected from the group consisting of SEQ ID NOS:50-119, 774, and 780; and/or wherein the light chain variable domain comprises: (a) an HVR-L1 c comprising an amino acid sequence selected from the group consisting of SEQ ID NOS:120-137, 775, and 781; (b) an HVR-L2 comprising an amino acid sequence selected from the group consisting of SEQ ID NOS:138-152, 776, and 782; and (c) an HVR-L3 comprising an amino acid sequence selected from the group consisting of SEQ ID NOS:153-236, 777, and 783. In any of the above embodiments, the light chain variable domain and/or heavy chain variable domain comprises an amino acid sequence with at least about 90% homology to the amino acid sequence indicated.

[0327] In some embodiments, the antibody is an antibody disclosed in Tables 1A, 1B and 8 and FIGS. 20A and 20B of U.S. Patent Application Publication No. US2019/0010230A1, reproduced below as TABLES C1-C2.

TABLE C1
Kabat heavy chain CDR sequences

| Antibody | | | |
|---|---|---|---|
| Name | CDR L1 | CDR L2 | CDR L3 |
| Ab21 | YSFTTYWIG | IIYPGDSDTRYSPSFQG | ARAGHYDGGHLGMDV |
| | (SEQ ID NO: 778) | (SEQ ID NO: 779) | (SEQ ID NO: 780) |
| Ab52 | YTFTSYYIH | IINPSGGSTSYAQKFQG | AREADDSSGYPLGLDV |
| | (SEQ ID NO: 772) | (SEQ ID NO: 773) | (SEQ ID NO: 774) |

TABLE C2
Kabat light chain CDR sequences

| Antibody | | | |
|---|---|---|---|
| Name | CDR L1 | CDR L2 | CDR L3 |
| Ab21 | RASQSVSSSYLA | GASNRAT | QQDDSAPYT |
| | (SEQ ID NO: 781) | (SEQ ID NO: 782) | (SEQ ID NO: 783) |
| Ab52 | RASQSVSSNLA | GASTRAT | QQVNSLPPT |
| | (SEQ ID NO: 775) | (SEQ ID NO: 776) | (SEQ ID NO: 777) |

TABLE C3
Kabat CDR sequences

| Antibody Name | CDR H1 | CDR H2 | CDR H3 | CDR L1 | CDR L2 | CDR L3 |
|---|---|---|---|---|---|---|
| Ab1 | FTFSSYAMS | VISGSGGSTYYADSVKG | AKGTPTLLFQH | RASQSVSSNLA | GASTRAT | QQLPYWPPT |
| | (SEQ ID NO: 377) | (SEQ ID NO: 399) | (SEQ ID NO: 424) | (SEQ ID NO: 494) | (SEQ ID NO: 512) | (SEQ ID NO: 527) |
| Ab2 | FTFSSSAMS | AISGSGGSTYYAD | AKVPSYDYWSGYSNYYYY | RASQSVGSNLA | GASTRAT | QQYFFYPPT |
| | (SEQ ID NO: 378) | SVKG (SEQ ID NO: 400) | MDV (SEQ ID NO: 425) | (SEQ ID NO: 495) | (SEQ ID NO: 512) | (SEQ ID NO: 528) |
| Ab3 | GTFSSYAIS | GIIPIFGTANYAQK | AREQYHVGMDV | QASQDISNYLN | DASNLAT | QQPFNFPYT |
| | (SEQ ID NO: 379) | FQG (SEQ ID NO: 401) | (SEQ ID NO: 426) | (SEQ ID NO: 496) | (SEQ ID NO: 513) | (SEQ ID NO: 529) |
| Ab4 | GTFSSYAIS | GIIPIFGTASYAQK | ARGVDSIMDY | RASQSVSSNLA | SASTRAT | QQDHDYPFT |
| | (SEQ ID NO: 379) | FQG (SEQ ID NO: 402) | (SEQ ID NO: 427) | (SEQ ID NO: 494) | (SEQ ID NO: 514) | (SEQ ID NO: 530) |
| Ab5 | YTFTSYYIH | IINPSGGSTSYAQK | ARAPQESPYVFDI | RASQSVSSSYLA | GASSRAT | QQYFSSPFT |
| | (SEQ ID NO: 380) | FQG (SEQ ID NO: 403) | (SEQ ID NO: 428) | (SEQ ID NO: 497) | (SEQ ID NO: 515) | (SEQ ID NO: 531) |
| Ab6 | YTFTSYYMH | IINPGGGSTSYAQKFQG | ARGSPTYGYLYDP | RASQSVSSYLA | DASKRAT | QQRVNLPPT |
| | (SEQ ID NO: 381) | (SEQ ID NO: 404) | (SEQ ID NO: 429) | (SEQ ID NO: 498) | (SEQ ID NO: 516) | (SEQ ID NO: 532) |
| Ab7 | YTFTSYYMH | IINPSGGSTTYAQKFQG | ARTSSKERDY | RASQSVSSYLA | DASKRAT | QQRISYPIT |
| | (SEQ ID NO: 381) | (SEQ ID NO: 405) | (SEQ ID NO: 430) | (SEQ ID NO: 498) | (SEQ ID NO: 516) | (SEQ ID NO: 533) |
| Ab8 | GSISSSSYYWG | SISYSGSTYYNPSL | ARGPYRLLLGMDV | RASQSISSYLN | GASSLQS | QQIDDTPIT |
| | (SEQ ID NO: 382) | KS (SEQ ID NO: 406) | (SEQ ID NO: 431) | (SEQ ID NO: 499) | (SEQ ID NO: 517) | (SEQ ID NO: 534) |
| Ab9 | YSFTSYWIG | IIYPGDSDTTYSPS | ARLHISGEVNWFD | RASQSVSSYLA | DASNRAT | QQFSYWPWT |
| | (SEQ ID NO: 383) | FQG (SEQ ID NO: 407) | P (SEQ ID NO: 432) | (SEQ ID NO: 498) | (SEQ ID NO: 518) | (SEQ ID NO: 535) |
| Ab10 | YSFTSNWIG | IIYPGDSDTRYSPS | AREAGYDYGELAF | RASQSVSSSYLA | GASSRAT | QQHDSSPPT |
| | (SEQ ID NO: 384) | FQG (SEQ ID NO: 408) | DI (SEQ ID NO: 433) | (SEQ ID NO: 497) | (SEQ ID NO: 515) | (SEQ ID NO: 536) |
| Abl11 | YSFTTYWIG | IIYPGDSDTRYSPS | ARAGHYDGGHLGMDV | RASQSVSSDYLA | GASSRAT | QQDYSYPWT |
| | (SEQ ID NO: 385) | FQG (SEQ ID NO: 408) | (SEQ ID NO: 434) | (SEQ ID NO: 500) | (SEQ ID NO: 515) | (SEQ ID NO: 537) |
| Ab12 | YSFTSYWIG | IIYPGDSDTRYSPSFQG | ARLGHYSGTVSSYGMDV | RASQSISSYLN | AASSLQS | QQEYAVPYT |
| | (SEQ ID NO: 383) | (SEQ ID NO: 408) | (SEQ ID NO: 435) | (SEQ ID NO: 499) | (SEQ ID NO: 519) | (SEQ ID NO: 538) |
| Ab13 | YTFTSYGIS | WISAYNGNTNYA | ARGPSHYYDLA | RASQSVSSYLA | DASNRAT | QQVSNYPIT |
| | (SEQ ID NO: 386) | QKLQG (SEQ ID NO: 409) | (SEQ ID NO: 436) | (SEQ ID NO: 498) | (SEQ ID NO: 518) | (SEQ ID NO: 539) |
| Ab14 | GSISSGGYYWS | NIYYSGSTVYNPS | ARGLYGYGVLDV | QASQDISNYLN | DASNLET | QQVDNIPPT |
| | (SEQ ID NO: 387) | LKS (SEQ ID NO: 410) | (SEQ ID NO: 437) | (SEQ ID NO: 496) | (SEQ ID NO: 520) | (SEQ ID NO: 540) |
| Ab15 | GSISSGGYYWS | NIYYSGSTVYNPS | ARGLYGYGVLDV | QASQDISNYLN | DASNLET | QQFDTYPT |
| | (SEQ ID NO: 387) | LKS (SEQ ID NO: 410) | (SEQ ID NO: 437) | (SEQ ID NO: 496) | (SEQ ID NO: 520) | (SEQ ID NO: 541) |
| Ab16 | GSISSNSYYWG | SIYYSGSTYYNPS | ARGVLGYGVFDY | QASQDISNYLN | DASNLET | QQFLNFPT |
| | (SEQ ID NO: 388) | LKS (SEQ ID NO: 411) | (SEQ ID NO: 438) | (SEQ ID NO: 496) | (SEQ ID NO: 520) | (SEQ ID NO: 542) |
| Ab17 | GSISSNSYYWG | SIYYSGSTYYNPSL | ARGVLGYGVFDY | QASQDISNYLN | DASNLET | QQFFNFPT |
| | (SEQ ID NO: 388) | KS (SEQ ID NO: 411) | (SEQ ID NO: 438) | (SEQ ID NO: 496) | (SEQ ID NO: 520) | (SEQ ID NO: 543) |
| Ab18 | GSISSYYWS | SIYYSGSTNYNPSL | ARDGGGEYPSGTP | QASQDISNYLN | DASNLET | QQFIDLPFT |
| | (SEQ ID NO: 389) | KS (SEQ ID NO: 412) | FDI (SEQ ID NO: 439) | (SEQ ID NO: 496) | (SEQ ID NO: 520) | (SEQ ID NO: 544) |
| Ab19 | GSISSYYWS | SIYYSGSTNYNPSL | ARDGGGEYPSGTP | QASQDISNYLN | DASNLET | QQYYDLPFT |
| | (SEQ ID NO: 389) | KS (SEQ ID NO: 412) | FDI (SEQ ID NO: 439) | (SEQ ID NO: 496) | (SEQ ID NO: 520) | (SEQ ID NO: 545) |
| Ab20 | GSISSYYWS | SIYYSGSTNYNPSL | ARSGMASFFDY | RASQSVSSDYLA | GASSRAT | QQFSSHPFT |
| | (SEQ ID NO: 389) | KS (SEQ ID NO: 412) | (SEQ ID NO: 440) | (SEQ ID NO: 500) | (SEQ ID NO: 515) | (SEQ ID NO: 546) |
| Ab22 | YSFTTYWIG | IIYPGDSDTRYSPS | ARAGHYDGGHLG | RASQSVSSSYLA | GASSRAT | QQDDRSPYT |
| | (SEQ ID NO: 385) | FQG (SEQ ID NO: 408) | MDV (SEQ ID NO: 434) | (SEQ ID NO: 497) | (SEQ ID NO: 515) | (SEQ ID NO: 547) |
| Ab23 | FTFSSYAMS | AISGSGGSTYYAD | AKLGGHSMDV | KSSQSVLYSSNNKNYLA | WASTRES | QQAYLPPIT |
| | (SEQ ID NO: 377) | SVKG (SEQ ID NO: 400) | (SEQ ID NO: 441) | (SEQ ID NO: 501) | (SEQ ID NO: 521) | (SEQ ID NO: 548) |
| Ab24 | FTFSSYAMS | AISGSGGSTYYAD | AKPLKRGRGFY | RASQSISSYLN | AASSLQS | QQAFSPPPWT |
| | (SEQ ID NO: 377) | SVKG (SEQ ID NO: 400) | (SEQ ID NO: 442) | (SEQ ID NO: 499) | (SEQ ID NO: 519) | (SEQ ID NO: 549) |
| Ab25 | FTFSSYAMS | VISGSGGSTYYAD | AKEGRTITMD | RASQSVSSSYLA | GASSRAT | QQDDRSPT |
| | (SEQ ID NO: 377) | SVKG (SEQ ID NO: 399) | (SEQ ID NO: 443) | (SEQ ID NO: 497) | (SEQ ID NO: 515) | (SEQ ID NO: 550) |
| Ab26 | FTFSSYAMS | VISGSGGSTYYAD | AKDQYSVLDY | RASQSVSSYLA | DASNRAT | QQEFDLPFT |
| | (SEQ ID NO: 377) | SVKG (SEQ ID NO: 399) | (SEQ ID NO: 444) | (SEQ ID NO: 498) | (SEQ ID NO: 518) | (SEQ ID NO: 551) |
| Ab27 | FTFSSYAMS | AISGSGGSTYYAD | AKKYSSRGVYFDY | RASQSVSSYLA | DASNRAT | QQYNNFPPT |
| | (SEQ ID NO: 377) | SVKG (SEQ ID NO: 400) | (SEQ ID NO: 445) | (SEQ ID NO: 498) | (SEQ ID NO: 518) | (SEQ ID NO: 552) |
| Ab28 | FTFSSYAMS | AISGSGGSTYYAD | ARLGGAVGARHVT | RASQSVSSYLA | DASKRAT | QQRYLRPIT |
| | (SEQ ID NO: 377) | SVKG (SEQ ID NO: 400) | YFDY (SEQ ID NO: 446) | (SEQ ID NO: 498) | (SEQ ID NO: 516) | (SEQ ID NO: 553) |
| Ab29 | FTFSSYGMH | VISYDGSNKYYAD | ARGQYYGGSGWF | RASQSVSSSYLA | GASSRAT | QQPGAVPT |
| | (SEQ ID NO: 390) | SVKG (SEQ ID NO: 413) | DP (SEQ ID NO: 447) | (SEQ ID NO: 497) | (SEQ ID NO: 515) | (SEQ ID NO: 554) |
| Ab30 | FTFSSYAMS | AISGSGGSTYYAD | ARLGQEYAYFQH | RASQSISSYLN | GASSLQS | QQVYITPIT |
| | (SEQ ID NO: 377) | SVKG (SEQ ID NO: 400) | (SEQ ID NO: 448) | (SEQ ID NO: 499) | (SEQ ID NO: 517) | (SEQ ID NO: 555) |
| Ab31 | FTFSSYGMH | LIWYDGSNKYYA | ARRRDGYYDEVFD | QASQDISNFLN | DASNLET | QQPVDLPFT |
| | (SEQ ID NO: 390) | DSVKG (SEQ ID NO: 414) | I (SEQ ID NO: 449) | (SEQ ID NO: 502) | (SEQ ID NO: 520) | (SEQ ID NO: 556) |
| Ab32 | FTFSSYAMS | AISGSGGSTYYAD | ARVPKHYVVLDY | RASQSVSSYLA | DASNRAT | QQYSFFPPT |
| | (SEQ ID NO: 377) | SVKG (SEQ ID NO: 400) | (SEQ ID NO: 450) | (SEQ ID NO: 498) | (SEQ ID NO: 518) | (SEQ ID NO: 557) |
| Ab33 | FTFSSYGMH | VISYDGSNKYYAD | ARAGGHLFDY | RASQSVSSYLA | DASNRAT | QQDSSFPPT |
| | (SEQ ID NO: 390) | SVKG (SEQ ID NO: 413) | (SEQ ID NO: 451) | (SEQ ID NO: 498) | (SEQ ID NO: 518) | (SEQ ID NO: 558) |
| Ab34 | FTFSSYGMH | VISYDGSNKYYAD | ARDRGGEYVDFAF | RASQSISSYLN | AASSLQS | QQSDFPPWT |
| | (SEQ ID NO: 390) | SVKG (SEQ ID NO: 413) | DI (SEQ ID NO: 452) | (SEQ ID NO: 499) | (SEQ ID NO: 519) | (SEQ ID NO: 559) |
| Ab35 | FTFSSYAMS | AISGSGGSTYYAD | ARTRSGYGASNYF | RASQSISSYLN | AASSLQS | QQGYSAPIT |
| | (SEQ ID NO: 377) | SVKG (SEQ ID NO: 400) | DY (SEQ ID NO: 453) | (SEQ ID NO: 499) | (SEQ ID NO: 519) | (SEQ ID NO: 560) |
| Ab36 | FTFSTYGMH | VIWYDGSNKYYA | ARGTGAAAASPAF | RASQSVSSYLA | DASNRAT | QQLFDWPT |
| | (SEQ ID NO: 391) | DSVKG (SEQ ID NO: 415) | DI (SEQ ID NO: 454) | (SEQ ID NO: 498) | (SEQ ID NO: 518) | (SEQ ID NO: 561) |
| Ab37 | FTFSSYAMS | AISGSGGSTYYAD | ARVGQYMLGMDV | RASQSVSSYLA | DASNRAT | QQRAFLFT |
| | (SEQ ID NO: 377) | SVKG (SEQ ID NO: 400) | (SEQ ID NO: 455) | (SEQ ID NO: 498) | (SEQ ID NO: 518) | (SEQ ID NO: 562) |
| Ab38 | FTFSTYGMH | VIWYDGSNKYYAD | ARGAPVDYGGIEP | RASQSVSSYLA | DASNRAT | QQIDFLPYT |
| | (SEQ ID NO: 391) | SVKG (SEQ ID NO: 415) | EYFQH (SEQ ID NO: 456) | (SEQ ID NO: 498) | (SEQ ID NO: 518) | (SEQ ID NO: 563) |
| Ab39 | FTFSSYAMS | AISGSGGSTYYAD | AKHYHVGIAFDI | RASQSISSYLN | AASSLQS | QQVYSPPIT |
| | (SEQ ID NO: 377) | SVKG (SEQ ID NO: 400) | (SEQ ID NO: 457) | (SEQ ID NO: 499) | (SEQ ID NO: 519) | (SEQ ID NO: 564) |
| Ab40 | FTFSSYAMS | AISGSGGSTYYAD | ARTRSGYGASNYF | RASQSISSYLN | AASSLQS | QQGYAAPIT |
| | (SEQ ID NO: 377) | SVKG (SEQ ID NO: 400) | DY (SEQ ID NO: 453) | (SEQ ID NO: 499) | (SEQ ID NO: 519) | (SEQ ID NO: 565) |
| Ab41 | FTFSTYAMS | AISGSGGSTYYAD | ARAMARKSVAFDI | RASQSVSSYLA | DASNRAT | QQRYALPIT |
| | (SEQ ID NO: 392) | SVKG (SEQ ID NO: 400) | (SEQ ID NO: 458) | (SEQ ID NO: 498) | (SEQ ID NO: 518) | (SEQ ID NO: 566) |
| Ab42 | FTFSSSAMS | AISGSGGSTYYAD | AKVPSYQRGTAFD | RASQSVSSSYLA | GASSRAT | QQYASPPIT |
| | (SEQ ID NO: 378) | SVKG (SEQ ID NO: 400) | P (SEQ ID NO: 459) | (SEQ ID NO: 497) | (SEQ ID NO: 515) | (SEQ ID NO: 567) |
| Ab43 | FTFSSSAMS | AISGSGGSTYYAD | AKSPAVAGIYRAD | RASQSISRYLN | AASSLQS | QQVYSTPIT |
| | (SEQ ID NO: 378) | SVKG (SEQ ID NO: 400) | Y (SEQ ID NO: 460) | (SEQ ID NO: 503) | (SEQ ID NO: 519) | (SEQ ID NO: 568) |
| Ab44 | FTFSTYGMH | VIWYDGSNKYYAD | ARGTGAAAASPAF | RASQSVSSYLA | DSSNRAT | QQLVHWPT |
| | (SEQ ID NO: 391) | SVKG (SEQ ID NO: 415) | DI (SEQ ID NO: 454) | (SEQ ID NO: 498) | (SEQ ID NO: 522) | (SEQ ID NO: 569) |
| Ab45 | YTFTSYYMH | IINPSGGSTSYAQK | ARGPGYTTALDYY | RASQSVSSNLA | GASTRAT | QQLDDWFT |
| | (SEQ ID NO: 381) | FQG (SEQ ID NO: 403) | YMDV (SEQ ID NO: 461) | (SEQ ID NO: 494) | (SEQ ID NO: 512) | (SEQ ID NO: 570) |
| Ab46 | YTFTSYYMH | IINPSGGSTSYAQK | ARPAKTADY | RASQSVSSYLA | DSSNRAT | QQRSNYPIT |
| | (SEQ ID NO: 381) | FQG (SEQ ID NO: 403) | (SEQ ID NO: 462) | (SEQ ID NO: 498) | (SEQ ID NO: 522) | (SEQ ID NO: 571) |
| Ab47 | YTFTSYYMH | IINPSGGSTTYAQK | ARPGKSMDV | RASQSVSSYLA | DASNRAT | QQRILYPIT |
| | (SEQ ID NO: 381) | FQG (SEQ ID NO: 405) | (SEQ ID NO: 463) | (SEQ ID NO: 498) | (SEQ ID NO: 518) | (SEQ ID NO: 572) |
| Ab48 | YTFTSYYMH | IINPSGGSTTYAQK | ARPGKSMDV | RASQSVSSYLA | DASNRAT | QQRAAYPIT |
| | (SEQ ID NO: 381) | FQG (SEQ ID NO: 405) | (SEQ ID NO: 463) | (SEQ ID NO: 498) | (SEQ ID NO: 518) | (SEQ ID NO: 573) |
| Ab49 | YTFTSYYMH | IINPSGGSTSYAQK | ARPAKTADY | RASQSVSSYLA | DASKRAT | QQRTSHPIT |
| | (SEQ ID NO: 381) | FQG (SEQ ID NO: 403) | (SEQ ID NO: 462) | (SEQ ID NO: 498) | (SEQ ID NO: 516) | (SEQ ID NO: 574) |
| Ab50 | YTFTSYYIH | IINPSGGSTSYAQK | ARAPQESPYVFDI | RASQSVSSSYLA | GASSRAT | QQYAGSPFT |
| | (SEQ ID NO: 380) | FQG (SEQ ID NO: 403) | (SEQ ID NO: 428) | (SEQ ID NO: 497) | (SEQ ID NO: 515) | (SEQ ID NO: 575) |
| Ab51 | YTFTSYYMH | IINPSGGSTSYAQK | ARGVGGQDYYYM | RASQSISSYLN | AASSLQS | QQFDDVFT |
| | (SEQ ID NO: 381) | FQG (SEQ ID NO: 403) | DV (SEQ ID NO: 464) | (SEQ ID NO: 499) | (SEQ ID NO: 519) | (SEQ ID NO: 576) |
| Ab53 | YTFTSYYIH | IINPSGGSTSYAQK | ARAPQESPYVFDI | RASQSVSSSYLA | GASSRAT | QQYVNSPFT |
| | (SEQ ID NO: 380) | FQG (SEQ ID NO: 403) | (SEQ ID NO: 428) | (SEQ ID NO: 497) | (SEQ ID NO: 515) | (SEQ ID NO: 577) |
| Ab54 | YTFTSYYMH | IINPSGGSTSYAQK | ARGPGYTTALDYY | RASQSINSYLN | AASSLQS | QQSDDDPFT |
| | (SEQ ID NO: 381) | FQG (SEQ ID NO: 403) | YMDV (SEQ ID NO: 461) | (SEQ ID NO: 504) | (SEQ ID NO: 519) | (SEQ ID NO: 578) |
| Ab55 | YTFTGSYMH | WINPNSGGTNYAQ | ARGPLYHPMIFDY | RASQSVSSYLA | DASNRAT | QQLSTYPLT |
| | (SEQ ID NO: 393) | KFQG (SEQ ID NO: 416) | (SEQ ID NO: 465) | (SEQ ID NO: 498) | (SEQ ID NO: 518) | (SEQ ID NO: 579) |
| Ab56 | YTFTGYYMH | SINPNSGGTNYAQ | ARASSVDN | RASQSVSSYLA | DASNRAT | QQRSVYPIT |
| | (SEQ ID NO: 394) | KFQG (SEQ ID NO: 417) | (SEQ ID NO: 466) | (SEQ ID NO: 498) | (SEQ ID NO: 518) | (SEQ ID NO: 580) |
| Ab57 | YTFTNYGIS | WISAYNGNTNYA | ARGPTKAYYGSGS | RASQSVSSYLA | DASKRAT | QQVSLFPLT |
| | (SEQ ID NO: 395) | QKLQG (SEQ ID NO: 409) | YVVFDP (SEQ ID NO: 467) | (SEQ ID NO: 498) | (SEQ ID NO: 516) | (SEQ ID NO: 581) |
| Ab58 | YSFTSYWIG | IIYPGDSDTRYSPS | ARLGIYSTGATAF | RASQSISSWLA | DASSLES | LDYNSYSPIT |
| | (SEQ ID NO: 383) | FQG (SEQ ID NO: 408) | DI (SEQ ID NO: 468) | (SEQ ID NO: 505) | (SEQ ID NO: 523) | (SEQ ID NO: 582) |
| Ab59 | YTFTGSYMH | WINPNSGGTNYAQ | ARGGVWYSLFDI | QASQDISNYLN | DASNLET | QQHIALPFT |
| | (SEQ ID NO: 393) | KFQG (SEQ ID NO: 416) | (SEQ ID NO: 469) | (SEQ ID NO: 496) | (SEQ ID NO: 520) | (SEQ ID NO: 583) |
| Ab60 | YTFTGYYMH | WINPNSGGTSYAQ | ARASKMGDD | RASQSVSSYLA | DASKRAT | QQRASMPIT |
| | (SEQ ID NO: 394) | KFQG (SEQ ID NO: 418) | (SEQ ID NO: 470) | (SEQ ID NO: 498) | (SEQ ID NO: 516) | (SEQ ID NO: 584) |
| Ab61 | YTFTSYGIH | WISAYNGNTNYA | ARGGVPRVSYFQH | RASQSVSSYLA | DSSNRAT | QQAFNRPPT |
| | (SEQ ID NO: 396) | QKLQG (SEQ ID NO: 409) | (SEQ ID NO: 471) | (SEQ ID NO: 498) | (SEQ ID NO: 522) | (SEQ ID NO: 585) |
| Ab62 | YSFTSYWIG | IIYPGDSDTRYSPS | ARAGHYDDWSGL | RASQSVSSYLA | DASKRAT | QQSSVHPYT |
| | (SEQ ID NO: 383) | FQG (SEQ ID NO: 408) | GLDV (SEQ ID NO: 472) | (SEQ ID NO: 498) | (SEQ ID NO: 516) | (SEQ ID NO: 586) |
| Ab63 | YTFTSYGIS | WISTYNGNTNYAQ | ARGSGSGYDSWY | RASQGIDSWLA | AASSLQS | QQAYSLPPT |
| | (SEQ ID NO: 386) | KLQG (SEQ ID NO: 419) | D (SEQ ID NO: 473) | (SEQ ID NO: 506) | (SEQ ID NO: 519) | (SEQ ID NO: 587) |
| Ab64 | YSFTSYWIG | IIYPGDSDTRYSPS | ARLGRWSSGSTAF | RASQSVSSNLA | GASTRAT | QQDDDGYT |
| | (SEQ ID NO: 383) | FQG (SEQ ID NO: 408) | DI (SEQ ID NO: 474) | (SEQ ID NO: 494) | (SEQ ID NO: 512) | (SEQ ID NO: 588) |
| Ab65 | YSFTSYWIG | IIYPGDSDTRYSPS | ARLGRKPSGSVAF | RASQSVSSYLA | DASNRAT | QQDYSWPYT |
| | (SEQ ID NO: 383) | FQG (SEQ ID NO: 408) | DI (SEQ ID NO: 475) | (SEQ ID NO: 498) | (SEQ ID NO: 518) | (SEQ ID NO: 589) |
| Ab66 | YTFTGSYMH | WINPNSGGTNYAQ | ARAGHKTHDY | RASQSVSSYLA | DASNRAT | QQRSAYPIT |
| | (SEQ ID NO: 393) | KFQG (SEQ ID NO: 416) | (SEQ ID NO: 476) | (SEQ ID NO: 498) | (SEQ ID NO: 518) | (SEQ ID NO: 590) |
| Ab67 | YTFTSYYMH | IINPSGGSTTYAQK | ARPGKSMDV | RASQSVSSYLA | DASNRAT | QQRSHFPIT |
| | (SEQ ID NO: 381) | FQG (SEQ ID NO: 405) | (SEQ ID NO: 463) | (SEQ ID NO: 498) | (SEQ ID NO: 518) | (SEQ ID NO: 591) |
| Ab68 | FTFSSYGMH | LIWYDGSNKYYA | AKPGSMTDY | RASQSVSSYLA | DASNRAT | QQRANYPIT |
| | (SEQ ID NO: 390) | DSVKG (SEQ ID NO: 414) | (SEQ ID NO: 477) | (SEQ ID NO: 498) | (SEQ ID NO: 518) | (SEQ ID NO: 592) |
| Ab69 | YTFTGSYMH | WINPNSGGTNYAQ | ARAKSVDHDY | RASQSVSSYLA | DASNRAT | QQRADYPIT |
| | (SEQ ID NO: 393) | KFQG (SEQ ID NO: 416) | (SEQ ID NO: 478) | (SEQ ID NO: 498) | (SEQ ID NO: 518) | (SEQ ID NO: 593) |
| Ab70 | YTFTGYYMH | WINPNSGGTSYAQ | ARASKMGDD | RASQSVSSYLA | DASNRAT | QQRSVYPIT |
| | (SEQ ID NO: 394) | KFQG (SEQ ID NO: 418) | (SEQ ID NO: 470) | (SEQ ID NO: 498) | (SEQ ID NO: 518) | (SEQ ID NO: 580) |
| Ab71 | YTFTSYYMH | IINPSGGSTSYAQK | ARDISTHDYDLAF | RASQSVSSSYLA | GASNRAT | QQAGSHPFT |
| | (SEQ ID NO: 381) | FQG (SEQ ID NO: 403) | DI (SEQ ID NO: 479) | (SEQ ID NO: 497) | (SEQ ID NO: 524) | (SEQ ID NO: 594) |
| Ab72 | GSISSYYWS | SIYYSGSTNYNPSL | ARSGTETLFDY | QASQDITNYLN | DASNLET | QQDVNYPPT |
| | (SEQ ID NO: 389) | KS (SEQ ID NO: 412) | (SEQ ID NO: 480) | (SEQ ID NO: 507) | (SEQ ID NO: 520) | (SEQ ID NO: 595) |
| Ab73 | YSFTSYWIG | IIYPGDSDTTYSPS | ARAKMLDDGYAF | RASQSVSSNLA | GASTRAT | QQDDNYPYT |
| | (SEQ ID NO: 383) | FQG (SEQ ID NO: 407) | DI (SEQ ID NO: 481) | (SEQ ID NO: 494) | (SEQ ID NO: 512) | (SEQ ID NO: 596) |
| Ab74 | YTFTGSYMH | WINPNSGGTNYAQ | ARAGHKTHDY | RASQSVSSYLA | DASNRAT | QQRSTFPIT |
| | (SEQ ID NO: 393) | KFQG (SEQ ID NO: 416) | (SEQ ID NO: 476) | (SEQ ID NO: 498) | (SEQ ID NO: 518) | (SEQ ID NO: 597) |
| Ab75 | YTFTGYYMH | WINPNSGGTNYAQ | ARDLGYSSLLALDI | RASQSVSSYLA | DASNRAT | QQVSNYPFT |
| | (SEQ ID NO: 394) | KFQG (SEQ ID NO: 416) | (SEQ ID NO: 482) | (SEQ ID NO: 498) | (SEQ ID NO: 518) | (SEQ ID NO: 598) |
| Ab76 | FTFSSYSMN | SISSSSSYIYYADS | ARGGGRRGDNNW | KSSQSVLYSSNNKNYLA | WASTRES | QQYHDAPIT |
| | (SEQ ID NO: 397) | VKG (SEQ ID NO: 420) | FDP (SEQ ID NO: 483) | (SEQ ID NO: 501) | (SEQ ID NO: 521) | (SEQ ID NO: 599) |
| Ab77 | FTFSSYGMH | VISYDGSNKYYAD | ARGPPHEMDY | KSSQSVLYSSNNKNYLA | WASTRES | QQAYVVPPT |
| | (SEQ ID NO: 390) | SVKG (SEQ ID NO: 413) | (SEQ ID NO: 484) | (SEQ ID NO: 501) | (SEQ ID NO: 521) | (SEQ ID NO: 600) |
| Ab78 | FTFSSYGMH | VIWYDGSNKYYA | ARTPYPWIYFDL | RASQSVSSYLA | DASNRAT | QQADNWPFT |
| | (SEQ ID NO: 390) | DSVKG (SEQ ID NO: 415) | (SEQ ID NO: 485) | (SEQ ID NO: 498) | (SEQ ID NO: 518) | (SEQ ID NO: 601) |
| Ab79 | FTFSSYSMN | YISGSSSTIYYADS | ARGGRRHYGGMD | RSSQSLLHSNGY | LGSHRAS | MQALESPRT |
| | (SEQ ID NO: 397) | VKG (SEQ ID NO: 421) | V (SEQ ID NO: 486) | NYLD (SEQ ID NO: 508) | (SEQ ID NO: 525) | (SEQ ID NO: 602) |
| Ab80 | GTFSSYAIS | GIIPIFGTANYAQK | ARGGGTFWSGSW | RASQSVSSYLA | DASNRAT | QQYVNWPFT |
| | (SEQ ID NO: 379) | FQG (SEQ ID NO: 401) | ALY (SEQ ID NO: 487) | (SEQ ID NO: 498) | (SEQ ID NO: 518) | (SEQ ID NO: 603) |
| Ab81 | GTFSSYAIS | GIIPIFGTANYAQK | ARDSGNYDYWSG | RASQSVSSYLA | DASNRAT | QQSSNWPWT |
| | (SEQ ID NO: 379) | FQG (SEQ ID NO: 401) | ALRY (SEQ ID NO: 488) | (SEQ ID NO: 498) | (SEQ ID NO: 518) | (SEQ ID NO: 604) |
| Ab82 | GSISSGGYYWS | YIYYSGSTVYNPS | ARVSSSWYKA | RASQGISSWLA | AASSLQS | QQASTFPIT |
| | (SEQ ID NO: 387) | LKS (SEQ ID NO: 422) | (SEQ ID NO: 489) | (SEQ ID NO: 509) | (SEQ ID NO: 519) | (SEQ ID NO: 605) |
| Ab83 | GSFSGYYWS | EIDHSGSTKYNPSL | ARVGVVVGRPGYS | RASQGISSWLA | AASSLQS | QQRNSLPLT |
| | (SEQ ID NO: 398) | KS (SEQ ID NO: 423) | AFDI (SEQ ID NO: 490) | (SEQ ID NO: 509) | (SEQ ID NO: 519) | (SEQ ID NO: 606) |
| Ab84 | YTFTSYGIS | WISTYNGNTNYAQ | ARGSGSGYDSWY | RASQSISSYLN | AASSLQS | QQSYDFPIT |
| | (SEQ ID NO: 386) | KLQG (SEQ ID NO: 419) | D (SEQ ID NO: 473) | (SEQ ID NO: 499) | (SEQ ID NO: 519) | (SEQ ID NO: 607) |
| Ab85 | FTFSSYGMH | VIWYDGSNKYYAD | AKDLGGYYGGAA | RASQDISSWLA | AASSLQS | QQEVDYPPLT |
| | (SEQ ID NO: 390) | SVKG (SEQ ID NO: 415) | YGMDV (SEQ ID NO: 491) | (SEQ ID NO: 510) | (SEQ ID NO: 519) | (SEQ ID NO: 608) |
| Ab86 | FTFSSYGMH | VISYDGSNKYYAD | AKDGVYYGLGNW | RASQSISSWLA | KASSLES | QQLNSYSPT |
| | (SEQ ID NO: 390) | SVKG (SEQ ID NO: 413) | FDP (SEQ ID NO: 492) | (SEQ ID NO: 505) | (SEQ ID NO: 526) | (SEQ ID NO: 609) |
| Ab87 | GSISSYYWS | SIYYSGSTNYNPSL | ARHGWDRVGWFD | RASQSVSRYLA | DASNRAT | QQYIFWPPT |
| | (SEQ ID NO: 389) | KS (SEQ ID NO: 412) | P (SEQ ID NO: 493) | (SEQ ID NO: 511) | (SEQ ID NO: 518) | (SEQ ID NO: 610) |

TABLE C4
Heavy chain variable regions

| Ab ID | HC Variable Region Sequences |
|---|---|
| Ab 1 | EVQLLESGGGLVQPGGSLRLSCAASGFTFSSYAMSWVRQAPGKGLEWVSVISGSGGSTY |
| | YADSVKGRFTISRDNSKNTLYLQMNSLRAEDTAVYYCAKGTPTLLFQHWGQGTLVTVSS |
| | (SEQ ID NO: 616) |
| Ab 2 | EVQLLESGGGLVQPGGSLRLSCAASGFTFSSSAMSWVRQAPGKGLEWVSAISGSGGSTYY |
| | ADSVKGRFTISRDNSKNTLYLQMNSLRAEDTAVYYCAKVPSYDYWSGYSNYYYYMDV |
| | WGKGTTVTVSS (SEQ ID NO: 618) |
| Ab 3 | QVQLVQSGAEVKKPGSSVKVSCKASGGTFSSYAISWVRQAPGQGLEWMGGIIPIFGTANY |
| | AQKFQGRVTITADESTSTAYMELSSLRSEDTAVYYCAREQYHVGMDVWGKGTTVTVSS |
| | (SEQ ID NO: 620) |
| Ab 4 | QVQLVQSGAEVKKPGSSVKVSCKASGGTFSSYAISWVRQAPGQGLEWMGGIIPIFGTASY |
| | AQKFQGRVTITADESTSTAYMELSSLRSEDTAVYYCARGVDSIMDYWGQGTLVTVSS |
| | (SEQ ID NO: 622) |
| Ab 5 | QVQLVQSGAEVKKPGASVKVSCKASGYTFTSYYTHWVRQAPGQGLEWMGIINPSGGSTS |
| | YAQKFQGRVTMTRDTSTSTVYMELSSLRSEDTAVYYCARAPQESPYVFDIWGQGTMVTV |
| | SS (SEQ ID NO: 624) |
| Ab 6 | QVQLVQSGAEVKKPGASVKVSCKASGYTFTSYYMHWVRQAPGQGLEWMGIINPGGGST |
| | SYAQKFQGRVTMTRDTSTSTVYMELSSLRSEDTAVYYCARGSPTYGYLYDPWGQGTLVT |
| | VSS (SEQ ID NO: 626) |
| Ab 7 | QVQLVQSGAEVKKPGASVKVSCKASGYTFTSYYMHWVRQAPGQGLEWMGIINPSGGST |
| | TYAQKFQGRVTMTRDTSTSTVYMELSSLRSEDTAVYYCARTSSKERDYWGQGTLVTVSS |
| | (SEQ ID NO: 628) |
| Ab 8 | QLQLQESGPGLVKPSETLSLTCTVSGGSISSSSYYWGWIRQPPGKGLEWIGSISYSGSTYYN |
| | PSLKSRVTISVDTSKNQFSLKLSSVTAADTAVYYCARGPYRLLLGMDVWGQGTTVTVSS |
| | (SEQ ID NO: 630) |
| Ab 9 | EVQLVQSGAEVKKPGESLKISCKGSGYSFTSYWIGWVRQMPGKGLEWMGITYPGDSDTT |
| | YSPSFQGQVTISADKSISTAYLQWSSLKASDTAMYYCARLHISGEVNWFDPWGQGTLVTV |
| | SS (SEQ ID NO: 632) |
| Ab 10 | EVQLVQSGAEVKKPGESLKISCKGSGYSFTSNWIGWVRQMPGKGLEWMGITYPGDSDTR |
| | YSPSFQGQVTISADKSISTAYLQWSSLKASDTAMYYCAREAGYDYGELAFDIWGQGTMV |
| | TVSS (SEQ ID NO: 634) |
| Ab 11 | EVQLVQSGAEVKKPGESLKISCKGSGYSFTTYWIGWVRQMPGKGLEWMGITYPGDSDTR |
| | YSPSFQGQVTISADKSISTAYLQWSSLKASDTAMYYCARAGHYDGGHLGMDVWGQGTT |
| | VTVSS (SEQ ID NO: 636) |
| Ab 12 | EVQLVQSGAEVKKPGESLKISCKGSGYSFTSYWIGWVRQMPGKGLEWMGITYPGDSDTR |
| | YSPSFQGQVTISADKSISTAYLQWSSLKASDTAMYYCARLGHYSGTVSSYGMDVWGQGT |
| | TVTVSS (SEQ ID NO: 638) |
| Ab 13 | QVQLVQSGAEVKKPGASVKVSCKASGYTFTSYGISWVRQAPGQGLEWMGWISAYNGNT |
| | NYAQKLQGRVTMTTDTSTSTAYMELRSLRSDDTAVYYCARGPSHYYDLAWGQGTLVTV |
| | SS (SEQ ID NO: 640) |
| Ab 14 | QVQLQESGPGLVKPSQTLSLTCTVSGGSISSGGYYWSWIRQHPGKGLEWIGNIYYSGSTVY |
| | NPSLKSRVTISVDTSKNQFSLKLSSVTAADTAVYYCARGLYGYGVLDVWGQGTMVTVSS |
| | (SEQ ID NO: 642) |
| Ab 15 | QVQLQESGPGLVKPSQTLSLTCTVSGGSISSGGYYWSWIRQHPGKGLEWIGNIYYSGSTVY |
| | NPSLKSRVTISVDTSKNQFSLKLSSVTAADTAVYYCARGLYGYGVLDVWGQGTMVTVSS |
| | (SEQ ID NO: 642) |
| Ab 16 | QLQLQESGPGLVKPSETLSLTCTVSGGSISSNSYYWGWIRQPPGKGLEWIGSIYYSGSTYY |
| | NPSLKSRVTISVDTSKNQFSLKLSSVTAADTAVYYCARGVLGYGVFDYWGQGTLVTVSS |
| | (SEQ ID NO: 645) |
| Ab 17 | QLQLQESGPGLVKPSETLSLTCTVSGGSISSNSYYWGWIRQPPGKGLEWIGSIYYSGSTYY |
| | NPSLKSRVTISVDTSKNQFSLKLSSVTAADTAVYYCARGVLGYGVFDYWGQGTLVTVSS |
| | (SEQ ID NO: 645) |
| Ab 18 | QVQLQESGPGLVKPSETLSLTCTVSGGSISSYYWSWIRQPPGKGLEWIGSIYYSGSTNYNPS |
| | LKSRVTISVDTSKNQFSLKLSSVTAADTAVYYCARDGGGEYPSGTPFDIWGQGTMVTVSS |
| | (SEQ ID NO: 648) |
| Ab 19 | QVQLQESGPGLVKPSETLSLTCTVSGGSISSYYWSWIRQPPGKGLEWIGSIYYSGSTNYNPS |
| | LKSRVTISVDTSKNQFSLKLSSVTAADTAVYYCARDGGGEYPSGTPFDIWGQGTMVTVSS |
| | (SEQ ID NO: 648) |
| Ab 20 | QVQLQESGPGLVKPSETLSLTCTVSGGSISSYYWSWIRQPPGKGLEWIGSIYYSGSTNYNPS |
| | LKSRVTISVDTSKNQFSLKLSSVTAADTAVYYCARSGMASFFDYWGQGTLVTVSS |
| | (SEQ ID NO: 651) |
| Ab 22 | EVQLVQSGAEVKKPGESLKISCKGSGYSFTTYWIGWVRQMPGKGLEWMGITYPGDSDTR |
| | YSPSFQGQVTISADKSISTAYLQWSSLKASDTAMYYCARAGHYDGGHLGMDVWGQGTT |
| | VTVSS (SEQ ID NO: 636) |
| Ab 23 | EVQLLESGGGLVQPGGSLRLSCAASGFTFSSYAMSWVRQAPGKGLEWVSAISGSGGSTY |
| | YADSVKGRFTISRDNSKNTLYLQMNSLRAEDTAVYYCAKLGGHSMDVWGQGTTVTVSS |
| | (SEQ ID NO: 654) |
| Ab 24 | EVQLLESGGGLVQPGGSLRLSCAASGFTFSSYAMSWVRQAPGKGLEWVSAISGSGGSTY |
| | YADSVKGRFTISRDNSKNTLYLQMNSLRAEDTAVYYCAKPLKRGRGFYWGQGTLVTVSS |
| | (SEQ ID NO: 656) |
| Ab 25 | EVQLLESGGGLVQPGGSLRLSCAASGFTFSSYAMSWVRQAPGKGLEWVSVISGSGGSTY |
| | YADSVKGRFTISRDNSKNTLYLQMNSLRAEDTAVYYCAKEGRTITMDWGQGTLVTVSS |
| | (SEQ ID NO: 658) |
| Ab 26 | EVQLLESGGGLVQPGGSLRLSCAASGFTFSSYAMSWVRQAPGKGLEWVSVISGSGGSTY |
| | YADSVKGRFTISRDNSKNTLYLQMNSLRAEDTAVYYCAKDQYSVLDYWGQGTLVTVSS |
| | (SEQ ID NO: 660) |
| Ab 27 | EVQLLESGGGLVQPGGSLRLSCAASGFTFSSYAMSWVRQAPGKGLEWVSAISGSGGSTY |
| | YADSVKGRFTISRDNSKNTLYLQMNSLRAEDTAVYYCAKKYSSRGVYFDYWGQGTLVT |
| | VSS (SEQ ID NO: 662) |
| Ab 28 | EVQLLESGGGLVQPGGSLRLSCAASGFTFSSYAMSWVRQAPGKGLEWVSAISGSGGSTY |
| | YADSVKGRFTISRDNSKNTLYLQMNSLRAEDTAVYYCARLGGAVGARHVTYFDYWGQG |
| | TLVTVSS (SEQ ID NO: 664) |
| Ab 29 | QVQLVESGGGVVQPGRSLRLSCAASGFTFSSYGMHWVRQAPGKGLEWVAVISYDGSNK |
| | YYADSVKGRFTISRDNSKNTLYLQMNSLRAEDTAVYYCARGQYYGGSGWFDPWGQGTL |
| | VTVSS (SEQ ID NO: 666) |
| Ab 30 | EVQLLESGGGLVQPGGSLRLSCAASGFTFSSYAMSWVRQAPGKGLEWVSAISGSGGSTY |
| | YADSVKGRFTISRDNSKNTLYLQMNSLRAEDTAVYYCARLGQEYAYFQHWGQGTLVTV |
| | SS (SEQ ID NO: 668) |
| Ab 31 | QVQLVESGGGVVQPGRSLRLSCAASGFTFSSYGMHWVRQAPGKGLEWVALIWYDGSNK |
| | YYADSVKGRFTISRDNSKNTLYLQMNSLRAEDTAVYYCARRRDGYYDEVFDIWGQGTM |
| | VTVSS (SEQ ID NO: 670) |
| Ab 32 | EVQLLESGGGLVQPGGSLRLSCAASGFTFSSYAMSWVRQAPGKGLEWVSAISGSGGSTY |
| | YADSVKGRFTISRDNSKNTLYLQMNSLRAEDTAVYYCARVPKHYVVLDYWGQGTLVTV |
| | SS (SEQ ID NO: 672) |
| Ab 33 | QVQLVESGGGVVQPGRSLRLSCAASGFTFSSYGMHWVRQAPGKGLEWVAVISYDGSNK |
| | YYADSVKGRFTISRDNSKNTLYLQMNSLRAEDTAVYYCARAGGHLFDYWGQGTLVTVS |
| | S (SEQ ID NO: 674) |
| Ab 34 | QVQLVESGGGVVQPGRSLRLSCAASGFTFSSYGMHWVRQAPGKGLEWVAVISYDGSNK |
| | YYADSVKGRFTISRDNSKNTLYLQMNSLRAEDTAVYYCARDRGGEYVDFAFDIWGQGT |
| | MVTVSS (SEQ ID NO: 676) |
| Ab 35 | EVQLLESGGGLVQPGGSLRLSCAASGFTFSSYAMSWVRQAPGKGLEWVSAISGSGGSTY |
| | YADSVKGRFTISRDNSKNTLYLQMNSLRAEDTAVYYCARTRSGYGASNYFDYWGQGTL |
| | VTVSS (SEQ ID NO: 678) |
| Ab 36 | QVQLVESGGGVVQPGRSLRLSCAASGFTFSTYGMHWVRQAPGKGLEWVAVIWYDGSNK |
| | YYADSVKGRFTISRDNSKNTLYLQMNSLRAEDTAVYYCARGTGAAAASPAFDIWGQGT |
| | MVTVSS (SEQ ID NO: 680) |
| Ab 37 | EVQLLESGGGLVQPGGSLRLSCAASGFTFSSYAMSWVRQAPGKGLEWVSAISGSGGSTY |
| | YADSVKGRFTISRDNSKNTLYLQMNSLRAEDTAVYYCARVGQYMLGMDVWGQGTTVT |
| | VSS (SEQ ID NO: 682) |
| Ab 38 | QVQLVESGGGVVQPGRSLRLSCAASGFTFSTYGMHWVRQAPGKGLEWVAVIWYDGSNK |
| | YYADSVKGRFTISRDNSKNTLYLQMNSLRAEDTAVYYCARGAPVDYGGIEPEYFQHWGQ |
| | GTLVTVSS (SEQ ID NO: 684) |
| Ab 39 | EVQLLESGGGLVQPGGSLRLSCAASGFTFSSYAMSWVRQAPGKGLEWVSAISGSGGSTY |
| | YADSVKGRFTISRDNSKNTLYLQMNSLRAEDTAVYYCAKHYHVGIAFDIWGQGTMVTVS |
| | S (SEQ ID NO: 686) |
| Ab 40 | EVQLLESGGGLVQPGGSLRLSCAASGFTFSSYAMSWVRQAPGKGLEWVSAISGSGGSTY |
| | YADSVKGRFTISRDNSKNTLYLQMNSLRAEDTAVYYCARTRSGYGASNYFDYWGQGTL |
| | VTVSS (SEQ ID NO: 678) |
| Ab 41 | EVQLLESGGGLVQPGGSLRLSCAASGFTFSTYAMSWVRQAPGKGLEWVSAISGSGGSTY |
| | YADSVKGRFTISRDNSKNTLYLQMNSLRAEDTAVYYCARAMARKSVAFDIWGQGTMVT |
| | VSS (SEQ ID NO: 689) |
| Ab 42 | EVQLLESGGGLVQPGGSLRLSCAASGFTFSSSAMSWVRQAPGKGLEWVSAISGSGGSTYY |
| | ADSVKGRFTISRDNSKNTLYLQMNSLRAEDTAVYYCAKVPSYQRGTAFDPWGQGTLVTV |
| | SS (SEQ ID NO: 691) |
| Ab 43 | EVQLLESGGGLVQPGGSLRLSCAASGFTFSSSAMSWVRQAPGKGLEWVSAISGSGGSTYY |
| | ADSVKGRFTISRDNSKNTLYLQMNSLRAEDTAVYYCAKSPAVAGIYRADYWGQGTLVTV |
| | SS (SEQ ID NO: 693) |
| Ab 44 | QVQLVESGGGVVQPGRSLRLSCAASGFTFSTYGMHWVRQAPGKGLEWVAVIWYDGSNK |
| | YYADSVKGRFTISRDNSKNTLYLQMNSLRAEDTAVYYCARGTGAAAASPAFDIWGQGT |
| | MVTVSS (SEQ ID NO: 680) |
| Ab 45 | QVQLVQSGAEVKKPGASVKVSCKASGYTFTSYYMHWVRQAPGQGLEWMGIINPSGGST |
| | SYAQKFQGRVTMTRDTSTSTVYMELSSLRSEDTAVYYCARGPGYTTALDYYYMDVWGK |
| | GTTVTVSS (SEQ ID NO: 696) |
| Ab 46 | QVQLVQSGAEVKKPGASVKVSCKASGYTFTSYYMHWVRQAPGQGLEWMGIINPSGGST |
| | SYAQKFQGRVTMTRDTSTSTVYMELSSLRSEDTAVYYCARPAKTADYWGQGTLVTVSS |
| | (SEQ ID NO: 698) |
| Ab 47 | QVQLVQSGAEVKKPGASVKVSCKASGYTFTSYYMHWVRQAPGQGLEWMGIINPSGGST |
| | TYAQKFQGRVTMTRDTSTSTVYMELSSLRSEDTAVYYCARPGKSMDVWGQGTTVTVSS |
| | (SEQ ID NO: 700) |
| Ab 48 | QVQLVQSGAEVKKPGASVKVSCKASGYTFTSYYMHWVRQAPGQGLEWMGIINPSGGST |
| | TYAQKFQGRVTMTRDTSTSTVYMELSSLRSEDTAVYYCARPGKSMDVWGQGTTVTVSS |
| | (SEQ ID NO: 700) |
| Ab 49 | QVQLVQSGAEVKKPGASVKVSCKASGYTFTSYYMHWVRQAPGQGLEWMGIINPSGGST |
| | SYAQKFQGRVTMTRDTSTSTVYMELSSLRSEDTAVYYCARPAKTADYWGQGTLVTVSS |
| | (SEQ ID NO: 698) |
| Ab 50 | QVQLVQSGAEVKKPGASVKVSCKASGYTFTSYYIHWVRQAPGQGLEWMGIINPSGGSTS |
| | YAQKFQGRVTMTRDTSTSTVYMELSSLRSEDTAVYYCARAPQESPYVFDIWGQGTMVTV |
| | SS (SEQ ID NO: 624) |
| Ab 51 | QVQLVQSGAEVKKPGASVKVSCKASGYTFTSYYMHWVRQAPGQGLEWMGIINPSGGST |
| | SYAQKFQGRVTMTRDTSTSTVYMELSSLRSEDTAVYYCARGVGGQDYYYMDVWGKGT |
| | TVTVSS (SEQ ID NO: 705) |
| Ab 53 | QVQLVQSGAEVKKPGASVKVSCKASGYTFTSYYIHWVRQAPGQGLEWMGIINPSGGSTS |
| | YAQKFQGRVTMTRDTSTSTVYMELSSLRSEDTAVYYCARAPQESPYVFDIWGQGTMVTV |
| | SS (SEQ ID NO: 624) |
| Ab 54 | QVQLVQSGAEVKKPGASVKVSCKASGYTFTSYYMHWVRQAPGQGLEWMGIINPSGGST |
| | SYAQKFQGRVTMTRDTSTSTVYMELSSLRSEDTAVYYCARGPGYTTALDYYYMDVWGK |
| | GTTVTVSS (SEQ ID NO: 696) |
| Ab 55 | QVQLVQSGAEVKKPGASVKVSCKASGYTFTGSYMHWVRQAPGQGLEWMGWINPNSGG |
| | TNYAQKFQGRVTMTRDTSISTAYMELSRLRSDDTAVYYCARGPLYHPMIFDYWGQGTLV |
| | TVSS (SEQ ID NO: 709) |
| Ab 56 | QVQLVQSGAEVKKPGASVKVSCKASGYTFTGYYMHWVRQAPGQGLEWMGSINPNSGG |
| | TNYAQKFQGRVTMTRDTSISTAYMELSRLRSDDTAVYYCARASSVDNWGQGTLVTVSS |
| | (SEQ ID NO: 711) |
| Ab 57 | QVQLVQSGAEVKKPGASVKVSCKASGYTFTNYGISWVRQAPGQGLEWMGWISAYNGNT |
| | NYAQKLQGRVTMTTDTSTSTAYMELRSLRSDDTAVYYCARGPTKAYYGSGSYVVFDPW |
| | GQGTLVTVSS (SEQ ID NO: 713) |
| Ab 58 | EVQLVQSGAEVKKPGESLKISCKGSGYSFTSYWIGWVRQMPGKGLEWMGITYPGDSDTR |
| | YSPSFQGQVTISADKSISTAYLQWSSLKASDTAMYYCARLGIYSTGATAFDIWGQGTMVT |
| | VSS (SEQ ID NO: 715) |
| Ab 59 | QVQLVQSGAEVKKPGASVKVSCKASGYTFTGSYMHWVRQAPGQGLEWMGWINPNSGG |
| | TNYAQKFQGRVTMTRDTSISTAYMELSRLRSDDTAVYYCARGGVWYSLFDIWGQGTMV |
| | TVSS (SEQ ID NO: 717) |
| Ab 60 | QVQLVQSGAEVKKPGASVKVSCKASGYTFTGYYMHWVRQAPGQGLEWMGWINPNSGG |
| | TSYAQKFQGRVTMTRDTSISTAYMELSRLRSDDTAVYYCARASKMGDDWGQGTLVTVS |
| | S (SEQ ID NO: 719) |
| Ab 61 | QVQLVQSGAEVKKPGASVKVSCKASGYTFTSYGIHWVRQAPGQGLEWMGWISAYNGNT |
| | NYAQKLQGRVTMTTDTSTSTAYMELRSLRSDDTAVYYCARGGVPRVSYFQHWGQGTLV |
| | TVSS (SEQ ID NO: 721) |
| Ab 62 | EVQLVQSGAEVKKPGESLKISCKGSGYSFTSYWIGWVRQMPGKGLEWMGITYPGDSDTR |
| | YSPSFQGQVTISADKSISTAYLQWSSLKASDTAMYYCARAGHYDDWSGLGLDVWGQGT |
| | MVTVSS (SEQ ID NO: 723) |
| Ab 63 | QVQLVQSGAEVKKPGASVKVSCKASGYTFTSYGISWVRQAPGQGLEWMGWISTYNGNT |
| | NYAQKLQGRVTMTTDTSTSTAYMELRSLRSDDTAVYYCARGSGSGYDSWYDWGQGTL |
| | VTVSS (SEQ ID NO: 725) |
| Ab 64 | EVQLVQSGAEVKKPGESLKISCKGSGYSFTSYWIGWVRQMPGKGLEWMGITYPGDSDTR |
| | YSPSFQGQVTISADKSISTAYLQWSSLKASDTAMYYCARLGRWSSGSTAFDIWGQGTMV |
| | TVSS (SEQ ID NO: 727) |
| Ab 65 | EVQLVQSGAEVKKPGESLKISCKGSGYSFTSYWIGWVRQMPGKGLEWMGITYPGDSDTR |
| | YSPSFQGQVTISADKSISTAYLQWSSLKASDTAMYYCARLGRKPSGSVAFDIWGQGTMVT |
| | VSS (SEQ ID NO: 729) |
| Ab 66 | QVQLVQSGAEVKKPGASVKVSCKASGYTFTGSYMHWVRQAPGQGLEWMGWINPNSGG |
| | TNYAQKFQGRVTMTRDTSISTAYMELSRLRSDDTAVYYCARAGHKTHDYWGQGTLVTV |
| | SS (SEQ ID NO: 731) |
| Ab 67 | QVQLVQSGAEVKKPGASVKVSCKASGYTFTSYYMHWVRQAPGQGLEWMGIINPSGGST |
| | TYAQKFQGRVTMTRDTSTSTVYMELSSLRSEDTAVYYCARPGKSMDVWGQGTTVTVSS |
| | (SEQ ID NO: 700) |
| Ab 68 | QVQLVESGGGVVQPGRSLRLSCAASGFTFSSYGMHWVRQAPGKGLEWVALIWYDGSNK |
| | YYADSVKGRFTISRDNSKNTLYLQMNSLRAEDTAVYYCAKPGSMTDYWGQGTLVTVSS |
| | (SEQ ID NO: 734) |
| Ab 69 | QVQLVQSGAEVKKPGASVKVSCKASGYTFTGSYMHWVRQAPGQGLEWMGWINPNSGG |
| | TNYAQKFQGRVTMTRDTSISTAYMELSRLRSDDTAVYYCARAKSVDHDYWGQGTLVTV |
| | SS (SEQ ID NO: 736) |
| Ab 70 | QVQLVQSGAEVKKPGASVKVSCKASGYTFTGYYMHWVRQAPGQGLEWMGWINPNSGG |
| | TSYAQKFQGRVTMTRDTSISTAYMELSRLRSDDTAVYYCARASKMGDDWGQGTLVTVS |
| | S (SEQ ID NO: 719) |
| Ab 71 | QVQLVQSGAEVKKPGASVKVSCKASGYTFTSYYMHWVRQAPGQGLEWMGIINPSGGST |
| | SYAQKFQGRVTMTRDTSTSTVYMELSSLRSEDTAVYYCARDISTHDYDLAFDIWGQGTM |
| | VTVSS (SEQ ID NO: 739) |
| Ab 72 | QVQLQESGPGLVKPSETLSLTCTVSGGSISSYYWSWIRQPPGKGLEWIGSIYYSGSTNYNPS |
| | LKSRVTISVDTSKNQFSLKLSSVTAADTAVYYCARSGTETLFDYWGQGTLVTVSS |
| | (SEQ ID NO: 741) |
| Ab 73 | EVQLVQSGAEVKKPGESLKISCKGSGYSFTSYWIGWVRQMPGKGLEWMGITYPGDSDTT |
| | YSPSFQGQVTISADKSISTAYLQWSSLKASDTAMYYCARAKMLDDGYAFDIWGQGTMVT |
| | VSS (SEQ ID NO: 743) |
| Ab 74 | QVQLVQSGAEVKKPGASVKVSCKASGYTFTGSYMHWVRQAPGQGLEWMGWINPNSGG |
| | TNYAQKFQGRVTMTRDTSISTAYMELSRLRSDDTAVYYCARAGHKTHDYWGQGTLVTV |
| | SS (SEQ ID NO: 731) |
| Ab 75 | QVQLVQSGAEVKKPGASVKVSCKASGYTFTGYYMHWVRQAPGQGLEWMGWINPNSGG |
| | TNYAQKFQGRVTMTRDTSISTAYMELSRLRSDDTAVYYCARDLGYSSLLALDIWGQGTM |
| | VTVSS (SEQ ID NO: 746) |
| Ab 76 | EVQLVESGGGLVKPGGSLRLSCAASGFTFSSYSMNWVRQAPGKGLEWVSSISSSSSYIYY |
| | ADSVKGRFTISRDNAKNSLYLQMNSLRAEDTAVYYCARGGGRRGDNNWFDPWGQGTLV |
| | TVSS (SEQ ID NO: 748) |
| Ab 77 | QVQLVESGGGVVQPGRSLRLSCAASGFTFSSYGMHWVRQAPGKGLEWVAVISYDGSNK |
| | YYADSVKGRFTISRDNSKNTLYLQMNSLRAEDTAVYYCARGPPHEMDYWGQGTLVTVS |
| | S (SEQ ID NO: 750) |
| Ab 78 | QVQLVESGGGVVQPGRSLRLSCAASGFTFSSYGMHWVRQAPGKGLEWVAVIWYDGSNK |
| | YYADSVKGRFTISRDNSKNTLYLQMNSLRAEDTAVYYCARTPYPWIYFDLWGRGTLVTV |
| | SS (SEQ ID NO: 752) |
| Ab 79 | EVQLVESGGGLVQPGGSLRLSCAASGFTFSSYSMNWVRQAPGKGLEWVSYISGSSSTIYY |
| | ADSVKGRFTISRDNAKNSLYLQMNSLRAEDTAVYYCARGGRRHYGGMDVWGQGTTVT |
| | VSS (SEQ ID NO: 754) |
| Ab 80 | QVQLVQSGAEVKKPGSSVKVSCKASGGTFSSYAISWVRQAPGQGLEWMGGIIPIFGTANY |
| | AQKFQGRVTITADESTSTAYMELSSLRSEDTAVYYCARGGGTFWSGSWALYWGQGTLVT |
| | VSS (SEQ ID NO: 756) |
| Ab 81 | QVQLVQSGAEVKKPGSSVKVSCKASGGTFSSYAISWVRQAPGQGLEWMGGIIPIFGTANY |
| | AQKFQGRVTITADESTSTAYMELSSLRSEDTAVYYCARDSGNYDYWSGALRYWGQGTL |
| | VTVSS (SEQ ID NO: 758) |
| Ab 82 | QVQLQESGPGLVKPSQTLSLTCTVSGGSISSGGYYWSWIRQHPGKGLEWIGYIYYSGSTVY |
| | NPSLKSRVTISVDTSKNQFSLKLSSVTAADTAVYYCARVSSSWYKAWGQGTMVTVSS |
| | (SEQ ID NO: 760) |
| Ab 83 | QVQLQQWGAGLLKPSETLSLTCAVYGGSFSGYYWSWIRQPPGKGLEWIGEIDHSGSTKY |
| | NPSLKSRVTISVDTSKNQFSLKLSSVTAADTAVYYCARVGVVVGRPGYSAFDIWGQGTM |
| | VTVSS (SEQ ID NO: 762) |
| Ab 84 | QVQLVQSGAEVKKPGASVKVSCKASGYTFTSYGISWVRQAPGQGLEWMGWISTYNGNT |
| | NYAQKLQGRVTMTTDTSTSTAYMELRSLRSDDTAVYYCARGSGSGYDSWYDWGQGTL |
| | VTVSS (SEQ ID NO: 725) |
| Ab 85 | QVQLVESGGGVVQPGRSLRLSCAASGFTFSSYGMHWVRQAPGKGLEWVAVIWYDGSNK |
| | YYADSVKGRFTISRDNSKNTLYLQMNSLRAEDTAVYYCAKDLGGYYGGAAYGMDVWG |
| | QGTTVTVSS (SEQ ID NO: 765) |
| Ab 86 | QVQLVESGGGVVQPGRSLRLSCAASGFTFSSYGMHWVRQAPGKGLEWVAVISYDGSNK |
| | YYADSVKGRFTISRDNSKNTLYLQMNSLRAEDTAVYYCAKDGVYYGLGNWFDPWGQG |
| | TLVTVSS (SEQ ID NO: 767) |
| Ab 87 | QVQLQESGPGLVKPSETLSLTCTVSGGSISSYYWSWIRQPPGKGLEWIGSIYYSGSTNYNPS |
| | LKSRVTISVDTSKNQFSLKLSSVTAADTAVYYCARHGWDRVGWFDPWGQGTLVTVSS |
| | (SEQ ID NO: 769) |

TABLE C5
Light chain variable regions

| Ab ID | LC Variable Region Sequences |
|---|---|
| Ab 1 | EIVMTQSPATLSVSPGERATLSCRASQSVSSNLAWYQQKPGQAPRLLIYGASTRATGIPAR |
| | FSGSGSGTEFTLTISSLQSEDFAVYYCQQLPYWPPTFGGGTKVEIK (SEQ ID NO: 617) |
| Ab 2 | EIVLTQSPATLSVSPGERATLSCRASQSVGSNLAWYQQKPGQAPRLLIYGASTRATGIPAR |
| | FSGSGSGTEFTLTISSLQSEDFAVYYCQQYFFYPPTFGGGTKVEIK (SEQ ID NO: 619) |
| Ab 3 | DIQMTQSPSSLSASVGDRVTITCQASQDISNYLNWYQQKPGKAPKWYDASNLATGVPSR |
| | FSGSGSGTDFTFTISSLQPEDIATYYCQQPFNFPYTFGGGTKVEIK (SEQ ID NO: 621) |
| Ab 4 | EIVMTQSPATLSVSPGERATLSCRASQSVSSNLAWYQQKPGQAPRLLIYSASTRATGIPAR |
| | FSGSGSGTEFTLTISSLQSEDFAVYYCQQDHDYPFTFGGGTKVEIK (SEQ ID NO: 623) |
| Ab 5 | EIVMTQSPGTLSLSPGERATLSCRASQSVSSSYLAWYQQKPGQAPRLLIYGASSRATGIPD |
| | RFSGSGSGTDFTLTISRLEPEDFAVYYCQQYFSSPFTFGGGTKVEIK (SEQ ID NO: 625) |
| Ab 6 | EIVLTQSPATLSLSPGERATLSCRASQSVSSYLAWYQQKPGQAPRLLIYDASKRATGIPARF |
| | SGSGSGTDFTLTISSLEPEDFAVYYCQQRVNLPPTFGGGTKVEIK (SEQ ID NO: 627) |
| Ab 7 | EIVLTQSPATLSLSPGERATLSCRASQSVSSYLAWYQQKPGQAPRLLIYDASKRATGIPARF |
| | SGSGSGTDFTLTISSLEPEDFAVYYCQQRISYPITFGGGTKVEIK (SEQ ID NO: 629) |
| Ab 8 | DIQMTQSPSSLSASVGDRVTITCRASQSISSYLNWYQQKPGKAPKWYGASSLQSGVPSRF |
| | SGSGSGTDFTLTISSLQPEDFATYYCQQIDDTPITFGGGTKVEIK (SEQ ID NO: 631) |
| Ab 9 | EIVLTQSPATLSLSPGERATLSCRASQSVSSYLAWYQQKPGQAPRLLIYDASNRATGIPARF |
| | SGSGSGTDFTLTISSLEPEDFAVYYCQQFSYWPWTFGGGTKVEIK (SEQ ID NO: 633) |
| Ab 10 | EIVLTQSPGTLSLSPGERATLSCRASQSVSSSYLAWYQQKPGQAPRLLIYGASSRATGIPDR |
| | FSGSGSGTDFTLTISRLEPEDFAVYYCQQHDSSPPTFGGGTKVEIK (SEQ ID NO: 635) |
| Ab 11 | EIVLTQSPGTLSLSPGERATLSCRASQSVSSDYLAWYQQKPGQAPRLLIYGASSRATGIPDR |
| | FSGSGSGTDFTLTISRLEPEDFAVYYCQQDYSYPWTFGGGTKVEIK (SEQ ID NO: 637) |
| Ab 12 | DIQMTQSPSSLSASVGDRVTITCRASQSISSYLNWYQQKPGKAPKLLIYAASSLQSGVPSRF |
| | SGSGSGTDFTLTISSLQPEDFATYYCQQEYAVPYTFGGGTKVEIK (SEQ ID NO: 639) |
| Ab 13 | EIVLTQSPATLSLSPGERATLSCRASQSVSSYLAWYQQKPGQAPRLLIYDASNRATGIPARF |
| | SGSGSGTDFTLTISSLEPEDFAVYYCQQVSNYPITFGGGTKVEIK (SEQ ID NO: 641) |
| Ab 14 | DIQMTQSPSSLSASVGDRVTITCQASQDISNYLNWYQQKPGKAPKWYDASNLETGVPSR |
| | FSGSGSGTDFTFTISSLQPEDIATYYCQQVDNIPPTFGGGTKVEIK (SEQ ID NO: 643) |
| Ab 15 | DIQMTQSPSSLSASVGDRVTITCQASQDISNYLNWYQQKPGKAPKWYDASNLETGVPSR |
| | FSGSGSGTDFTFTISSLQPEDIATYYCQQFDTYPTFGGGTKVEIK (SEQ ID NO: 644) |
| Ab 16 | DIQMTQSPSSLSASVGDRVTITCQASQDISNYLNWYQQKPGKAPKWYDASNLETGVPSR |
| | FSGSGSGTDFTFTISSLQPEDIATYYCQQFLNFPTFGGGTKVEIK (SEQ ID NO: 646) |
| Ab 17 | DIQMTQSPSSLSASVGDRVTITCQASQDISNYLNWYQQKPGKAPKLLIYDASNLETGVPSR |
| | FSGSGSGTDFTFTISSLQPEDIATYYCQQFFNFPTFGGGTKVEIK (SEQ ID NO: 647) |
| Ab 18 | DIQMTQSPSSLSASVGDRVTITCQASQDISNYLNWYQQKPGKAPKLLIYDASNLETGVPSR |
| | FSGSGSGTDFTFTISSLQPEDIATYYCQQFIDLPFTFGGGTKVEIK (SEQ ID NO: 649) |
| Ab 19 | DIQMTQSPSSLSASVGDRVTITCQASQDISNYLNWYQQKPGKAPKLLIYDASNLETGVPSR |
| | FSGSGSGTDFTFTISSLQPEDIATYYCQQYYDLPFTFGGGTKVEIK (SEQ ID NO: 650) |
| Ab 20 | EIVLTQSPGTLSLSPGERATLSCRASQSVSSDYLAWYQQKPGQAPRLLIYGASSRATGIPDR |
| | FSGSGSGTDFTLTISRLEPEDFAVYYCQQFSSHPFTFGGGTKVEIK (SEQ ID NO: 652) |
| Ab 22 | EIVMTQSPGTLSLSPGERATLSCRASQSVSSSYLAWYQQKPGQAPRLLIYGASSRATGIPD |
| | RFSGSGSGTDFTLTISRLEPEDFAVYYCQQDDRSPYTFGGGTKVEIK (SEQ ID NO: 653) |
| Ab 23 | DIVMTQSPDSLAVSLGERATINCKSSQSVLYSSNNKNYLAWYQQKPGQPPKLLISWASTR |
| | ESGVPDRFSGSGSGTDFTLTISSLQAEDVAVYYCQQAYLPPITFGGGTKVEIK |
| | (SEQ ID NO: 655) |
| Ab 24 | DIQMTQSPSSLSASVGDRVTITCRASQSISSYLNWYQQKPGKAPKLLIYAASSLQSGVPSRF |
| | SGSGSGTDFTLTISSLQPEDFATYYCQQAFSPPPWTFGGGTKVEIK (SEQ ID NO: 657) |
| Ab 25 | EIVLTQSPGTLSLSPGERATLSCRASQSVSSSYLAWYQQKPGQAPRLLIYGASSRATGIPDR |
| | FSGSGSGTDFTLTISRLEPEDFAVYYCQQDDRSPTFGGGTKVEIK (SEQ ID NO: 659) |
| Ab 26 | EIVLTQSPATLSLSPGERATLSCRASQSVSSYLAWYQQKPGQAPRLLIYDASNRATGIPA |
| | RFSGSGSGTDFTLTISSLEPEDFAVYYCQQEFDLPFTFGGGTKVEIK (SEQ ID NO: 661) |
| Ab 27 | EIVLTQSPATLSLSPGERATLSCRASQSVSSYLAWYQQKPGQAPRLLIYDASNRATGIPARF |
| | SGSGSGTDFTLTISSLEPEDFAVYYCQQYNNFPPTFGGGTKVEIK (SEQ ID NO: 663) |
| Ab 28 | EIVLTQSPATLSLSPGERATLSCRASQSVSSYLAWYQQKPGQAPRLLIYDASKRATGIPARF |
| | SGSGSGTDFTLTISSLEPEDFAVYYCQQRYLRPITFGGGTKVEIK (SEQ ID NO: 665) |
| Ab 29 | EIVLTQSPGTLSLSPGERATLSCRASQSVSSSYLAWYQQKPGQAPRLLIYGASSRATGIPDR |
| | FSGSGSGTDFTLTISRLEPEDFAVYYCQQPGAVPTFGGGTKVEIK (SEQ ID NO: 667) |
| Ab 30 | DIQMTQSPSSLSASVGDRVTITCRASQSISSYLNWYQQKPGKAPKLLIYGAS SLQSGVPSRF |
| | SGSGSGTDFTLTISSLQPEDFATYYCQQVYITPITFGGGTKVEIK (SEQ ID NO: 669) |
| Ab 31 | DIQLTQSPSSLSASVGDRVTITCQASQDISNFLNWYQQKPGKAPKLLIYDASNLETGVPSRF |
| | SGSGSGTDFTFTISSLQPEDIATYYCQQPVDLPFTFGGGTKVEIK (SEQ ID NO: 671) |
| Ab 32 | EIVLTQSPATLSLSPGERATLSCRASQSVSSYLAWYQQKPGQAPRLLIYDASNRATGIPARF |
| | SGSGSGTDFTLTISSLEPEDFAVYYCQQYSFFPPTFGGGTKVEIK (SEQ ID NO: 673) |
| Ab 33 | EIVLTQSPATLSLSPGERATLSCRASQSVSSYLAWYQQKPGQAPRLLIYDASNRATGIPARF |
| | SGSGSGTDFTLTISSLEPEDFAVYYCQQDSSFPPTFGGGTKVEIK (SEQ ID NO: 675) |
| Ab 34 | DIQMTQSPSSLSASVGDRVTITCRASQSISSYLNWYQQKPGKAPKLLIYAASSLQSGVPSRF |
| | SGSGSGTDFTLTISSLQPEDFATYYCQQSDFPPWTFGGGTKVEIK (SEQ ID NO: 677) |
| Ab 35 | DIQMTQSPSSLSASVGDRVTITCRASQSISSYLNWYQQKPGKAPKLLIYAASSLQSGVPSRF |
| | SGSGSGTDFTLTISSLQPEDFATYYCQQGYSAPITFGGGTKVEIK (SEQ ID NO: 679) |
| Ab 36 | EIVLTQSPATLSLSPGERATLSCRASQSVSSYLAWYQQKPGQAPRLLIYDASNRATGIPARF |
| | SGSGSGTDFTLTISSLEPEDFAVYYCQQLFDWPTFGGGTKVEIK (SEQ ID NO: 681) |
| Ab 37 | EIVLTQSPATLSLSPGERATLSCRASQSVSSYLAWYQQKPGQAPRLLIYDASNRATGIPARF |
| | SGSGSGTDFTLTISSLEPEDFAVYYCQQRAFLFTFGGGTKVEIK (SEQ ID NO: 683) |
| Ab 38 | EIVLTQSPATLSLSPGERATLSCRASQSVSSYLAWYQQKPGQAPRLLIYDASNRATGIPARF |
| | SGSGSGTDFTLTISSLEPEDFAVYYCQQIDFLPYTFGGGTKVEIK (SEQ ID NO: 685) |
| Ab 39 | DIQMTQSPSSLSASVGDRVTITCRASQSISSYLNWYQQKPGKAPKLLIYAASSLQSGVPSRF |
| | SGSGSGTDFTLTISSLQPEDFATYYCQQVYSPPITFGGGTKVEIK (SEQ ID NO: 687) |
| Ab 40 | DIQMTQSPSSLSASVGDRVTITCRASQSISSYLNWYQQKPGKAPKLLIYAASSLQSGVPSRF |
| | SGSGSGTDFTLTISSLQPEDFATYYCQQGYAAPITFGGGTKVEIK (SEQ ID NO: 688) |
| Ab 41 | EIVLTQSPATLSLSPGERATLSCRASQSVSSYLAWYQQKPGQAPRLLIYDASNRATGIPARF |
| | SGSGSGTDFTLTISSLEPEDFTVYYCQQRYALPITFGGGTKVEIK (SEQ ID NO: 690) |
| Ab 42 | EIVLTQSPGTLSLSPGERATLSCRASQSVSSSYLAWYQQKPGQAPRLLIYGASSRATGIPDR |
| | FSGSGSGTDFTLTISRLEPEDFAVYYCQQYASPPITFGGGTKVEIK (SEQ ID NO: 692) |
| Ab 43 | DIQMTQSPSSLSASVGDRVTITCRASQSISRYLNWYQQKPGKAPKLLIYAASSLQSGVPSRF |
| | SGSGSGTDFTLTISSLQPEDFATYYCQQVYSTPITFGGGTKVEIK (SEQ ID NO: 694) |
| Ab 44 | EIVMTQSPATLSLSPGERATLSCRASQSVSSYLAWYQQKPGQAPRLLIYDSSNRATGIPAR |
| | FSGSGSGTDFTLTISSLEPEDFAVYYCQQLVHWPTFGGGTKVEIK (SEQ ID NO: 695) |
| Ab 45 | EIVMTQSPATLSVSPGERATLSCRASQSVSSNLAWYQQKPGQAPRLLIYGASTRATGIPAR |
| | FSGSGSGTEFTLTISSLQSEDFAVYYCQQLDDWFTFGGGTKVEIK (SEQ ID NO: 697) |
| Ab 46 | EIVLTQSPATLSLSPGERATLSCRASQSVSSYLAWYQQKPGQAPRLLIYDSSNRATGIPARF |
| | SGSGSGTDFTLTISSLEPEDFAVYYCQQRSNYPITFGGGTKVEIK (SEQ ID NO: 699) |
| Ab 47 | EIVLTQSPGTLSLSPGERATLSCRASQSVSSYLAWYQQKPGQAPRLLIYDASNRATGIPARF |
| | SGSGSGTDFTLTISSLEPEDFAVYYCQQRILYPITFGGGTKVEIK (SEQ ID NO: 701) |
| Ab 48 | EIVLTQSPATLSLSPGERATLSCRASQSVSSYLAWYQQKPGQAPRLLIYDASNRATGIPARF |
| | SGSGSGTDFTLTISSLEPEDFAVYYCQQRAAYPITFGGGTKVEIK (SEQ ID NO: 702) |
| Ab 49 | EIVLTQSPATLSLSPGERATLSCRASQSVSSYLAWYQQKPGQAPRLLIYDASKRATGIPARF |
| | SGSGSGTDFTLTISSLEPEDFAVYYCQQRTSHPITFGGGTKVEIK (SEQ ID NO: 703) |
| Ab 50 | EIVLTQSPGTLSLSPGERATLSCRASQSVSSSYLAWYQQKPGQAPRLLIYGASSRATGIPDR |
| | FSGSGSGTDFTLTISRLEPEDFAVYYCQQYAGSPFTFGGGTKVEIK (SEQ ID NO: 704) |
| Ab 51 | DIQMTQSPSSLSASVGDRVTITCRASQSISSYLNWYQQKPGKAPKLLIYAASSLQSGVPSRF |
| | SGSGSGTDFTLTISSLQPEDFATYYCQQFDDVFTFGGGTKVEIK (SEQ ID NO: 706) |
| Ab 53 | EIVLTQSPGTLSLSPGERATLSCRASQSVSSSYLAWYQQKPGQAPRLLIYGASSRATGIPDR |
| | FSGSGSGTDFTLTISRLEPEDFAVYYCQQYVNSPFTFGGGTKVEIK (SEQ ID NO: 707) |
| Ab 54 | DIQMTQSPSSLSASVGDRVTITCRASQSINSYLNWYQQKPGKAPKLLIYAASSLQSGVPSR |
| | FSGSGSGTDFTLTISSLQPEDFATYYCQQSDDDPFTFGGGTKVEIK (SEQ ID NO: 708) |
| Ab 55 | EIVLTQSPATLSLSPGERATLSCRASQSVSSYLAWYQQKPGQAPRLLIYDASNRATGIPARF |
| | SGSGSGTDFTLTISSLEPEDFAVYYCQQLSTYPLTFGGGTKVEIK (SEQ ID NO: 710) |
| Ab 56 | EIVMTQSPATLSLSPGERATLSCRASQSVSSYLAWYQQKPGQAPRLLIYDASNRATGIPAR |
| | FSGSGSGTDFTLTISSLEPEDFAVYYCQQRSVYPITFGGGTKVEIK (SEQ ID NO: 712) |
| Ab 57 | EIVLTQSPATLSLSPGERATLSCRASQSVSSYLAWYQQKPGQAPRLLIYDASKRATGIPARF |
| | SGSGSGTDFTLTISSLEPEDFAVYYCQQVSLFPLTFGGGTKVEIK (SEQ ID NO: 714) |
| Ab 58 | DIQMTQSPSTLSASVGDRVTITCRASQSISSWLAWYQQKPGKAPKWYDASSLESGVPSR |
| | FSGSGSGTEFTLTISSLQPDDFATYYCLDYNSYSPITFGGGTKVEIK (SEQ ID NO: 716) |
| Ab 59 | DIQMTQSPSSLSASVGDRVTITCQASQDISNYLNWYQQKPGKAPKLLIYDASNLETGVPSR |
| | FSGSGSGTDFTFTISSLQPEDIATYYCQQHIALPFTFGGGTKVEIK (SEQ ID NO: 718) |
| Ab 60 | EIVLTQSPATLSLSPGERATLSCRASQSVSSYLAWYQQKPGQAPRLLIYDASKRATGIPARF |
| | SGSGSGTDFTLTISSLEPEDFAVYYCQQRASMPITFGGGTKVEIK (SEQ ID NO: 720) |
| Ab 61 | EIVLTQSPATLSLSPGERATLSCRASQSVSSYLAWYQQKPGQAPRLLIYDSSNRATGIPARF |
| | SGSGSGTDFTLTISSLEPEDFAVYYCQQAFNRPPTFGGGTKVEIK (SEQ ID NO: 722) |
| Ab 62 | EIVLTQSPATLSLSPGERATLSCRASQSVSSYLAWYQQKPGQAPRLLIYDASKRATGIPARF |
| | SGSGSGTDFTLTISSLEPEDFAVYYCQQSSVHPYTFGGGTKVEIK (SEQ ID NO: 724) |
| Ab 63 | DIQMTQSPSSVSASVGDRVTITCRASQGIDSWLAWYQQKPGKAPKLLIYAASSLQSGVPSR |
| | FSGSGSGTDFTLTISSLQPEDFATYYCQQAYSLPPTFGGGTKVEIK (SEQ ID NO: 726) |
| Ab 64 | EIVMTQSPATLSVSPGERATLSCRASQSVSSNLAWYQQKPGQAPRLLIYGASTRATGIPAR |
| | FSGSGSGTEFTLTISSLQSEDFAVYYCQQDDDGYTFGGGTKVEIK (SEQ ID NO: 728) |
| Ab 65 | EIVLTQSPATLSLSPGERATLSCRASQSVSSYLAWYQQKPGQAPRLLIYDASNRATGIPARF |
| | SGSGSGTDFTLTISSLEPEDFAVYYCQQDYSWPYTFGGGTKVEIK (SEQ ID NO: 730) |
| Ab 66 | EIVLTQSPGTLSLSPGERATLSCRASQSVSSYLAWYQQKPGQAPRLLIYDASNRATGIPARF |
| | SGSGSGTDFTLTISSLEPEDFAVYYCQQRSAYPITFGGGTKVEIK (SEQ ID NO: 732) |
| Ab 67 | EIVLTQSPATLSLSPGERATLSCRASQSVSSYLAWYQQKPGQAPRLLIYDASNRATGIPARF |
| | SGSGSGTDFTLTISSLEPEDFAVYYCQQRSHFPITFGGGTKVEIK (SEQ ID NO: 733) |
| Ab 68 | EIVLTQSPATLSLSPGERATLSCRASQSVSSYLAWYQQKPGQAPRLLIYDASNRATGIPARF |
| | SGSGSGTDFTLTISSLEPEDFAVYYCQQRANYPITFGGGTKVEIK (SEQ ID NO: 735) |
| Ab 69 | EIVLTQSPATLSLSPGERATLSCRASQSVSSYLAWYQQKPGQAPRLLIYDASNRATGIPARF |
| | SGSGSGTDFTLTISSLEPEDFAVYYCQQRADYPITFGGGTKVEIK (SEQ ID NO: 737) |
| Ab 70 | EIVLTQSPATLSLSPGERATLSCRASQSVSSYLAWYQQKPGQAPRLLIYDASNRATGIPARF |
| | SGSGSGTDFTLTISSLEPEDFAVYYCQQRSVYPITFGGGTKVEIK (SEQ ID NO: 738) |
| Ab 71 | EIVMTQSPGTLSLSPGERATLSCRASQSVSSSYLAWYQQKPGQAPRLLIYGASNRATGIPD |
| | RFSGSGSGTDFTLTISRLEPEDFAVYYCQQAGSHPFTFGGGTKVEIK (SEQ ID NO: 740) |
| Ab 72 | DIQMTQSPSSLSASVGDRVTITCQASQDITNYLNWYQQKPGKAPKWYDASNLETGVPSR |
| | FSGSRSGTDFTFTISSLQPEDIATYYCQQDVNYPPTFGGGTKVEIK (SEQ ID NO: 742) |
| Ab 73 | EIVMTQSPATLSVSPGERATLSCRASQSVSSNLAWYQQKPGQAPRLLIYGASTRATGIPAR |
| | FSGSGSGTEFTLTISSLQSEDFAVYYCQQDDNYPYTFGGGTKVEIK (SEQ ID NO: 744) |
| Ab 74 | EIVLTQSPATLSLSPGERATLSCRASQSVSSYLAWYQQKPGQAPRLLIYDASNRATGIPARF |
| | SGSGSGTDFTLTISSLEPEDFAVYYCQQRSTFPITFGGGTKVEIK (SEQ ID NO: 745) |
| Ab 75 | EIVLTQSPATLSLSPGERATLSCRASQSVSSYLAWYQQKPGQAPRLLIYDASNRATGIPARF |
| | SGSGSGTDFTLTISSLEPEDFAVYYCQQVSNYPFTFGGGTKVEIK (SEQ ID NO: 747) |
| Ab 76 | DIVMTQSPDSLAVSLGERATINCKSSQSVLYSSNNKNYLAWYQQKPGQPPKLLIYWASTR |
| | ESGVPDRFSGSGSGTDFTLTISSLQAEDVAVYYCQQYHDAPITFGGGTKVEIK |
| | (SEQ ID NO: 749) |
| Ab 77 | DIVMTQSPDSLAVSLGERATINCKSSQSVLYSSNNKNYLAWYQQKPGQPPKLLIYWASTR |
| | ESGVPDRFSGSGSGTDFTLTISSLQAEDVAVYYCQQAYVVPPTFGGGTKVEIK |
| | (SEQ ID NO: 751) |
| Ab 78 | EIVLTQSPATLSLSPGERATLSCRASQSVSSYLAWYQQKPGQAPRLLIYDASNRATGIPARF |
| | SGSGSGTDFTLTISSLEPEDFAVYYCQQADNWPFTFGGGTKVEIK (SEQ ID NO: 753) |
| Ab 79 | DIVMTQSPLSLPVTPGEPASISCRSSQSLLHSNGYNYLDWYLQKPGQSPQLLIYLGSHRAS |
| | GVPDRFSGSGSGTDFTLKISRVEAEDVGVYYCMQALESPRTFGGGTKVEIK |
| | (SEQ ID NO: 755) |
| Ab 80 | EIVLTQSPATLSLSPGERATLSCRASQSVSSYLAWYQQKPGQAPRLLIYDASNRATGIPARF |
| | SGSGSGTDFTLTISSLEPEDFAVYYCQQYVNWPFTFGGGTKVEIK (SEQ ID NO: 757) |
| Ab 81 | EIVLTQSPATLSLSPGERATLSCRASQSVSSYLAWYQQKPGQAPRLLIYDASNRATGIPARF |
| | SGSGSGTDFTLTISSLEPEDFAVYYCQQSSNWPWTFGGGTKVEIK (SEQ ID NO: 759) |
| Ab 82 | DIQMTQSPSSVSASVGDRVTITCRASQGISSWLAWYQQKPGKAPKLLIYAASSLQSGVPSR |
| | FSGSGSGTDFTLTISSLQPEDFATYYCQQASTFPITFGGGTKVEIK (SEQ ID NO: 761) |
| Ab 83 | DIQMTQSPSSVSASVGDRVTITCRASQGISSWLAWYQQKPGKAPKLLIYAASSLQSGVPSR |
| | FSGSGSGTDFTLTISSLQPEDFATYYCQQRNSLPLTFGGGTKVEIK (SEQ ID NO: 763) |
| Ab 84 | DIQMTQSPSSLSASVGDRVTITCRASQSISSYLNWYQQKPGKAPKLLIYAASSLQSGVPSRF |
| | SGSGSGTDFTLTISSLQPEDFATYYCQQSYDFPITFGGGTKVEIK (SEQ ID NO: 764) |
| Ab 85 | DIQLTQSPSSVSASVGDRVTITCRASQDISSWLAWYQQKPGKAPKLLIYAASSLQSGVPSR |
| | FSGSGSGTDFTLTISSLQPEDFATYYCQQEVDYPPLTFGGGTKVEIK (SEQ ID NO: 766) |
| Ab 86 | DIQMTQSPSTLSASVGDRVTITCRASQSISSWLAWYQQKPGKAPKWYKASSLESGVPSR |
| | FSGSGSGTEFTLTISSLQPDDFATYYCQQLNSYSPTFGGGTKVEIK (SEQ ID NO: 768) |
| Ab 87 | EIVLTQSPATLSLSPGERATLSCRASQSVSRYLAWYQQKPGQAPRLLIYDASNRATGIPAR |
| | FSGSGSGTDFTLTISSLEPEDFAVYYCQQYIFWPPTFGGGTKVEIK (SEQ ID NO: 770) |

[0328] In some embodiments, anti-TREM2 antibodies of the present disclosure comprise (a) a heavy chain variable region comprising at least one, two, or three HVRs selected from HVR-H1, HVR-H2, and HVR-H3 of any one of the antibodies listed in TABLE C3 or selected from Abl, Ab2, Ab3, Ab4, Ab5, Ab6, Ab7, Ab8, Ab9, Ab10, Abl11, Ab12, Ab13, Ab14, Ab15, Ab16, Ab17, Ab18, Ab19, Ab20, Ab21, Ab22, Ab23, Ab24, Ab25, Ab26, Ab27, Ab28, Ab29, Ab30, Ab31, Ab32, Ab33, Ab34, Ab35, Ab36, Ab37, Ab38, Ab39, Ab40, Ab41, Ab42, Ab43, Ab44, Ab45, Ab46, Ab47, Ab48, Ab49, Ab50, Ab51, Ab52, Ab53, Ab54, Ab55, Ab56, Ab57, Ab58, Ab59, Ab60, Ab61, Ab62, Ab63, Ab64, Ab65, Ab66, Ab67, Ab68, Ab69, Ab70, Ab71, Ab72, Ab73, Ab74, Ab75, Ab76, Ab77, Ab78, Ab79, Ab80, Ab81, Ab82, Ab83, Ab84, Ab85, Ab86, and Ab87; and/or (b) a light chain variable region comprising at least one, two, or three HVRs selected from HVR-L1, HVR-L2, and HVR-L3 of any one of the antibodies selected from Abl, Ab2, Ab3, Ab4, Ab5, Ab6, Ab7, Ab8, Ab9, Ab10, Ab11, Ab12, Ab13, Ab14, Ab15, Ab16, Ab17, Ab18, Ab19, Ab20, Ab21, Ab22, Ab23, Ab24, Ab25, Ab26, Ab27, Ab28, Ab29, Ab30, Ab31, Ab32, Ab33, Ab34, Ab35, Ab36, Ab37, Ab38, Ab39, Ab40, Ab41, Ab42, Ab43, Ab44, Ab45, Ab46, Ab47, Ab48, Ab49, Ab50, Ab51, Ab52, Ab53, Ab54, Ab55, Ab56, Ab57, Ab58, Ab59, Ab60, Ab61, Ab62, Ab63, Ab64, Ab65, Ab66, Ab67, Ab68, Ab69, Ab70, Ab71, Ab72, Ab73, Ab74, Ab75, Ab76, Ab77, Ab78, Ab79, Ab80, Ab81, Ab82, Ab83, Ab84, Ab85, Ab86, and Ab87.

[0329] In some embodiments, the anti-TREM2 antibody comprises a light chain variable domain and a heavy chain variable region, wherein the light chain variable region comprises a HVR-L1, HVR-L2, and HVR-L3, and the heavy chain variable domain comprises a HVR-H1, HVR-H2, and HVR-H3 of an antibody listed in TABLE C3 or selected from the group consisting of: Abl, Ab2, Ab3, Ab4, Ab5, Ab6, Ab7, Ab8, Ab9, Ab10, Ab 11, Ab12, Ab13, Ab14, Ab15, Ab16, Ab17, Ab18, Ab19, Ab20, Ab21, Ab22, Ab23, Ab24, Ab25, Ab26, Ab27, Ab28, Ab29, Ab30, Ab31, Ab32, Ab33, Ab34, Ab35, Ab36, Ab37, Ab38, Ab39, Ab40, Ab41, Ab42, Ab43, Ab44, Ab45, Ab46, Ab47, Ab48, Ab49, Ab50, Ab51, Ab52, Ab53, Ab54, Ab55, Ab56, Ab57, Ab58, Ab59, Ab60, Ab61, Ab62, Ab63, Ab64, Ab65, Ab66, Ab67, Ab68, Ab69, Ab70, Ab71, Ab72, Ab73, Ab74, Ab75, Ab76, Ab77, Ab78, Ab79, Ab80, Ab81, Ab82, Ab83, Ab84, Ab85, Ab86, and Ab87.

[0330] In some embodiments, an anti-human TREM2 antibody is an antibody which competes with a monoclonal antibody selected from the group consisting of: Abl, Ab2, Ab3, Ab4, Ab5, Ab6, Ab7, Ab8, Ab9, Ab10, A11, Ab12, Ab13, Ab14, Ab15, Ab16, Ab17, Ab18, Ab19, Ab20, Ab21, Ab22, Ab23, Ab24, Ab25, Ab26, Ab27, Ab28, Ab29, Ab30, Ab31, Ab32, Ab33, Ab34, Ab35, Ab36, Ab37, Ab38, Ab39, Ab40, Ab41, Ab42, Ab43, Ab44, Ab45, Ab46, Ab47, Ab48, Ab49, Ab50, Ab51, Ab52, Ab53, Ab54, Ab55, Ab56, Ab57, Ab58, Ab59, Ab60, Ab61, Ab62, Ab63, Ab64, Ab65, Ab66, Ab67, Ab68, Ab69, Ab70, Ab71, Ab72, Ab73, Ab74, Ab75, Ab76, Ab77, Ab78, Ab79, Ab80, Ab81, Ab82, Ab83, Ab84, Ab85, Ab86, and Ab87 for binding to TREM2.

[0331] In some embodiments, each of the light chain variable regions disclosed in TABLE C5 and each of the heavy chain variable regions disclosed in TABLE C4 may be attached to the light chain constant regions (EN1) and heavy chain constant regions (EN2) to form complete antibody light and heavy chains, respectively, as further discussed below. Further, each of the generated heavy and light chain sequences may be combined to form a complete antibody structure. It should be understood that the heavy chain and light chain variable regions provided herein can also be attached to other constant domains having different sequences than the exemplary sequences listed herein.

[0332] D. PCT Patent Application Publication No. WO2017/062672A1

[0333] In some embodiments, the TREM2 agonist is an antibody or an antigen-binding fragment thereof, as described in PCT Patent Application Publication No. WO2017/062672A1 (“the '672 application”), which is incorporated by reference herein, in its entirety.

[0334] In some embodiments, the TREM2 binding agent comprises an antibody that comprises a light chain variable domain comprising a CDRL1, CDRL2, and CDRL3 (also referred to as HVR-L1, HVR-L2, and HVR-L3, respectively), and a heavy chain variable domain comprising a CDRH1, CDRH2, and CDRH3 (also referred to as HVR-H1, HVR-H2, and HVR-H3, respectively) disclosed in the '672 application specification. In some embodiments, the TREM2 binding agent comprises an antibody that comprises a light chain variable domain and a heavy chain variable domain disclosed in the '672 application specification.

[0335] In some embodiments, the antibody comprises a light chain variable domain and a heavy chain variable domain, wherein the light chain variable domain, or the heavy chain variable domain, or both comprise at least one, two, three, four, five, or six HVRs selected from HVR-L1, HVR-L2, HVR-L3, HVR-H1, HVR-H2, and HVR-H3 such that: (a) the HVR-L1 comprises an amino acid sequence selected from the group consisting of SEQ ID NOS:829-843, 1401, 1510-1514, 1554-1558, and 1646-1648; (b) the HVR-L2 comprises an amino acid sequence selected from the group consisting of SEQ ID NOS:844-853, 1515-1517, and 1559-1563; (c) the HVR-L3 comprises an amino acid sequence selected from the group consisting of SEQ ID NOS:854-867, 1402, 1403, 1518-1522, and 1564-1566; (d) the HVR-H1 comprises an amino acid sequence selected from the group consisting of SEQ ID NOS:868-885, 1404, 1523-1525, 1567-1574, and 1649-1655; (e) the HVR-H2 comprises an amino acid sequence selected from the group consisting of SEQ ID NOS:886-904, 1405-1407, 1526-1528, 1575-1582, 1656-1662, and 1708; or (f) the HVR-H3 comprises an amino acid sequence selected from the group consisting of SEQ ID NOS:905-992, 1408, 1409, 1529, 1530, and 1583-1590. In some embodiments: (a) the I-HVR-L1 comprises the amino acid sequence of SEQ ID NO:831, the HVR-L2 comprises the amino acid sequence of SEQ ID NO:846, the HVR-L3 comprises the amino acid sequence of SEQ ID NO:856, the HVR-H1 comprises the amino acid sequence of SEQ ID NO:871, the HVR-H2 comprises the amino acid sequence of SEQ ID NO:889, and the HVR-H3 comprises the amino acid sequence of SEQ ID NO:908; (b) the HVR-L1 comprises the amino acid sequence of SEQ ID NO:834, the HVR-L2 comprises the amino acid sequence of SEQ ID NO:848, the HVR-L3 comprises the amino acid sequence of SEQ ID NO:859, the HVR-H1 comprises the amino acid sequence of SEQ ID NO:873, the HVR-H2 comprises the amino acid sequence of SEQ ID NO:891, and the HVR-H3 comprises the amino acid sequence of SEQ ID NO:910; (c) the HVR-L1 comprises the amino acid sequence of SEQ ID NO:831, the HVR-L2 comprises the amino acid sequence of SEQ ID NO:846, the HVR-L3 comprises the amino acid sequence of SEQ ID NO:856, the HVR-H1 comprises the amino acid sequence of SEQ ID NO:871, the HVR-H2 comprises the amino acid sequence of SEQ ID NO:889, and the HVR-H3 comprises the amino acid sequence of SEQ ID NO:908; (d) the HVR-L1 comprises the amino acid sequence of SEQ ID NO:836, the HVR-L2 comprises the amino acid sequence of SEQ ID NO:849, the HVR-L3 comprises the amino acid sequence of SEQ ID NO:855, the HVR-H1 comprises the amino acid sequence of SEQ ID NO:875, the HVR-H2 comprises the amino acid sequence of SEQ ID NO:893, and the HVR-H3 comprises the amino acid sequence of SEQ ID NO:912; (e) the HVR-H1 comprises the amino acid sequence of SEQ ID NO:978, the HVR-H2 comprises the amino acid sequence of SEQ ID NO:896, and the HVR-H3 comprises the amino acid sequence of SEQ ID NO:915; (f) the HVR-L1 comprises the amino acid sequence of SEQ ID NO:839, the HVR-L2 comprises the amino acid sequence of SEQ ID NO:848, the HVR-L3 comprises the amino acid sequence of SEQ ID NO:863, the HVR-H1 comprises the amino acid sequence of SEQ ID NO:880, the HVR-H2 comprises the amino acid sequence of SEQ ID NO:898, and the HVR-H3 comprises the amino acid sequence of SEQ ID NO:917; (g) the HVR-L1 comprises the amino acid sequence of SEQ ID NO:840, the HVR-L2 comprises the amino acid sequence of SEQ ID NO:848, the HVR-L3 comprises the amino acid sequence of SEQ ID NO:868, the HVR-H1 comprises the amino acid sequence of SEQ ID NO:881, the HVR-H2 comprises the amino acid sequence of SEQ ID NO:899, and the HVR-H3 comprises the amino acid sequence of SEQ ID NO:918; (h) the HVR-L1 comprises the amino acid sequence of SEQ ID NO:841, the HVR-L2 comprises the amino acid sequence of SEQ ID NO:852, the HVR-L3 comprises the amino acid sequence of SEQ ID NO:865, the HVR-H1 comprises the amino acid sequence of SEQ ID NO:882, the HVR-H2 comprises the amino acid sequence of SEQ ID NO:900, and the HVR-H3 comprises the amino acid sequence of SEQ ID NO:919; (i) the HVR-L1 comprises the amino acid sequence of SEQ ID NO:842, the HVR-L2 comprises the amino acid sequence of SEQ ID NO:849, the HVR-L3 comprises the amino acid sequence of SEQ ID NO:866, the HVR-H1 comprises the amino acid sequence of SEQ ID NO:883, the HVR-H2 comprises the amino acid sequence of SEQ ID NO:902, and the HVR-H3 comprises the amino acid sequence of SEQ ID NO:920; or (j) the HVR-L1 comprises the amino acid sequence of SEQ ID NO:936, the HVR-L2 comprises the amino acid sequence of SEQ ID NO:849, the HVR-L3 comprises the amino acid sequence of SEQ ID NO:855, the HVR-H1 comprises the amino acid sequence of SEQ ID NO:885, the HVR-H2 comprises the amino acid sequence of SEQ ID NO:904, and the HVR-H3 comprises the amino acid sequence of SEQ ID NO:922. In some embodiments, the antibody comprises a light chain variable domain and a heavy chain variable domain, wherein the light chain variable domain comprises: (a) an HVR-L1 comprising an amino acid sequence selected from the group consisting of SEQ ID NOS:829-843, 1401, 1510-1514, 1554-1558, and 1646-1648, or an amino acid sequence with at least about 90% homology to an amino acid sequence selected from the group consisting of SEQ ID NOS:829-843, 1401, 1510-1514, 1554-1558, and 1646-1648; (b) an HVR-L2 comprising an amino acid sequence selected from the group consisting of SEQ ID NOS:844-853, 1515-1517, and 1559-1563, or an amino acid sequence with at least about 90% homology to an amino acid sequence selected from the group consisting of SEQ ID NOS:844-853, 1515-1517, and 1559-1563; and (c) an HVR-L3 comprising an amino acid sequence selected from the group consisting of SEQ ID NOS:854-867, 1402, 1403, 1518-1522, and 1564-1566, or an amino acid sequence with at least about 90% homology to an amino acid sequence selected from the group consisting of SEQ ID NOS:854-867, 1402, 1403, 1518-1522, and 1564-1566; and wherein the heavy chain variable domain comprises: (a) an HVR-H1 comprising an amino acid sequence selected from the group consisting of SEQ ID NOS:868-885, 1404, 1523-1525, 1567-1574, and 1649-1655, or an amino acid sequence with at least about 90% homology to an amino acid sequence selected from the group consisting of SEQ ID NOS:868-885, 1404, 1523-1525, 1567-1574, and 1649-1655; (b) an HVR-H2 comprising an amino acid sequence selected from the group consisting of SEQ ID NOS:886-904, 1405-1407, 1526-1528, 1575-1582, 1656-1662, and 1708, or an amino acid sequence with at least about 90% homology to an amino acid sequence selected from the group consisting of SEQ ID NOS:886-904, 1405-1407, 1526-1528, 1575-1582, 1656-1662, and 1708; and (c) an HVR-H3 comprising an amino acid sequence selected from the group consisting of SEQ ID NOS:905-992, 1408, 1409, 1529, 1530, and 1583-1590, or an amino acid sequence with at least about 90% homology to an amino acid sequence selected from the group consisting of SEQ ID NOS:905-992, 1408, 1409, 1529, 1530, and 1583-1590. In some embodiments, the antibody comprises a light chain variable domain comprising an amino acid sequence selected from the group consisting of SEQ ID NOS:1039-1218, 1422-1454, 1499-1509, 1544-1550, 1629-1636, 1641, 1643, 1664, 1669, and 1670; and/or a heavy chain variable domain comprising an amino acid sequence selected from the group consisting of SEQ ID NOS:1219-1400, 1455-1498, 1551-1553, and 1637-1640, 1642-1645, and 1665-1667.

[0336] In some embodiments, the antibody comprises a light chain variable domain and a heavy chain variable domain, wherein: (a) the light chain variable domain comprises the amino acid sequence of SEQ ID NO:1153 and the heavy chain variable domain comprises the amino acid sequence of SEQ ID NO:1341; (b) the light chain variable domain comprises the amino acid sequence of SEQ ID NO:1670 and the heavy chain variable domain comprises the amino acid sequence of SEQ ID NO:1341; (c) the light chain variable domain comprises the amino acid sequence of SEQ ID NO:1154 and the heavy chain variable domain comprises the amino acid sequence of SEQ ID NO:1342; (d) the light chain variable domain comprises the amino acid sequence of SEQ ID NO:1155 and the heavy chain variable domain comprises the amino acid sequence of SEQ ID NO:1343; (e) the light chain variable domain comprises the amino acid sequence of SEQ ID NO:1156 and the heavy chain variable domain comprises the amino acid sequence of SEQ ID NO:1344; (f) the light chain variable domain comprises the amino acid sequence of SEQ ID NO:1157 and the heavy chain variable domain comprises the amino acid sequence of SEQ ID NO:1345; (g) the light chain variable domain comprises the amino acid sequence of SEQ ID NO:1158 and the heavy chain variable domain comprises the amino acid sequence of SEQ ID NO:1346; (h) the light chain variable domain comprises the amino acid sequence of SEQ ID NO:1159 and the heavy chain variable domain comprises the amino acid sequence of SEQ ID NO:1346; (i) the light chain variable domain comprises the amino acid sequence of SEQ ID NO:1160 and the heavy chain variable domain comprises the amino acid sequence of SEQ ID NO:1347; (j) the light chain variable domain comprises the amino acid sequence of SEQ ID NO:1161 and the heavy chain variable domain comprises the amino acid sequence of SEQ ID NO:1348; (k) the light chain variable domain comprises the amino acid sequence of SEQ ID NO:1162 and the heavy chain variable domain comprises the amino acid sequence of SEQ ID NO:1349; (l) the light chain variable domain comprises the amino acid sequence of SEQ ID NO:1163 and the heavy chain variable domain comprises the amino acid sequence of SEQ ID NO:1350; (m) the light chain variable domain comprises the amino acid sequence of SEQ ID NO:1663 and the heavy chain variable domain comprises the amino acid sequence of SEQ ID NO:1665; (n) the light chain variable domain comprises the amino acid sequence of SEQ ID NO:1664 and the heavy chain variable domain comprises the amino acid sequence of SEQ ID NO:1666; (o) the light chain variable domain comprises the amino acid sequence of SEQ ID NO:1664 and the heavy chain variable domain comprises the amino acid sequence of SEQ ID NO:1667; (p) the light chain variable domain comprises the amino acid sequence of SEQ ID NO:1039 and the heavy chain variable domain comprises the amino acid sequence of SEQ ID NO:1219; (q) the light chain variable domain comprises the amino acid sequence of SEQ ID NO:1050 and the heavy chain variable domain comprises the amino acid sequence of SEQ ID NO:1229; (r) the light chain variable domain comprises the amino acid sequence of SEQ ID NO:1072 and the heavy chain variable domain comprises the amino acid sequence of SEQ ID NO:1239; (s) the light chain variable domain comprises the amino acid sequence of SEQ ID NO:1061 and the heavy chain variable domain comprises the amino acid sequence of SEQ ID NO:1249; (t) the light chain variable domain comprises the amino acid sequence of SEQ ID NO:1669 and the heavy chain variable domain comprises the amino acid sequence of SEQ ID NO:1249; (u) the light chain variable domain comprises the amino acid sequence of SEQ ID NO:1083 and the heavy chain variable domain comprises the amino acid sequence of SEQ ID NO:1259; (v) the light chain variable domain comprises the amino acid sequence of SEQ ID NO:1094 and the heavy chain variable domain comprises the amino acid sequence of SEQ ID NO:1269; (w) the light chain variable domain comprises the amino acid sequence of SEQ ID NO:1105 and the heavy chain variable domain comprises the amino acid sequence of SEQ ID NO:1279; (x) the light chain variable domain comprises the amino acid sequence of SEQ ID NO:1106 and the heavy chain variable domain comprises the amino acid sequence of SEQ ID NO:1280; (y) the light chain variable domain comprises the amino acid sequence of SEQ ID NO:1107 and the heavy chain variable domain comprises the amino acid sequence of SEQ ID NO:1281; (z) the light chain variable domain comprises the amino acid sequence of SEQ ID NO:1118 and the heavy chain variable domain comprises the amino acid sequence of SEQ ID NO:1249; (aa) the light chain variable domain comprises the amino acid sequence of SEQ ID NO:1119 and the heavy chain variable domain comprises the amino acid sequence of SEQ ID NO:1291; (bb) the light chain variable domain comprises the amino acid sequence of SEQ ID NO:1130 and the heavy chain variable domain comprises the amino acid sequence of SEQ ID NO:1281; (cc) the light chain variable domain comprises the amino acid sequence of SEQ ID NO:1499 and the heavy chain variable domain comprises the amino acid sequence of SEQ ID NO:1301; (dd) the light chain variable domain comprises the amino acid sequence of SEQ ID NO:1131 and the heavy chain variable domain comprises the amino acid sequence of SEQ ID NO:1311; (ee) the light chain variable domain comprises the amino acid sequence of SEQ ID NO:1142 and the heavy chain variable domain comprises the amino acid sequence of SEQ ID NO:1331; (ff) the light chain variable domain comprises the amino acid sequence of SEQ ID NO:1164 and the heavy chain variable domain comprises the amino acid sequence of SEQ ID NO:1351; (gg) the light chain variable domain comprises the amino acid sequence of SEQ ID NO:1175 and the heavy chain variable domain comprises the amino acid sequence of SEQ ID NO:1455; (hh) the light chain variable domain comprises the amino acid sequence of SEQ ID NO:1185 and the heavy chain variable domain comprises the amino acid sequence of SEQ ID NO:1361; (ii) the light chain variable domain comprises the amino acid sequence of SEQ ID NO:1216 and the heavy chain variable domain comprises the amino acid sequence of SEQ ID NO:1371; (jj) the light chain variable domain comprises the amino acid sequence of SEQ ID NO:1217 and the heavy chain variable domain comprises the amino acid sequence of SEQ ID NO:1381; (kk) the light chain variable domain comprises the amino acid sequence of SEQ ID NO:1218 and the heavy chain variable domain comprises the amino acid sequence of SEQ ID NO:1391; (ll) the light chain variable domain comprises the amino acid sequence of SEQ ID NO:1544 and the heavy chain variable domain comprises the amino acid sequence of SEQ ID NO:1551; (mm) the light chain variable domain comprises the amino acid sequence of SEQ ID NO:1629 and the heavy chain variable domain comprises the amino acid sequence of SEQ ID NO:1551; (nn) the light chain variable domain comprises the amino acid sequence of SEQ ID NO:1545 and the heavy chain variable domain comprises the amino acid sequence of SEQ ID NO:1552; (oo) the light chain variable domain comprises the amino acid sequence of SEQ ID NO:1546 and the heavy chain variable domain comprises the amino acid sequence of SEQ ID NO:1551; (pp) the light chain variable domain comprises the amino acid sequence of SEQ ID NO:1546 and the heavy chain variable domain comprises the amino acid sequence of SEQ ID NO:1637; (qq) the light chain variable domain comprises the amino acid sequence of SEQ ID NO:1547 and the heavy chain variable domain comprises the amino acid sequence of SEQ ID NO:1551; (rr) the light chain variable domain comprises the amino acid sequence of SEQ ID NO:1548 and the heavy chain variable domain comprises the amino acid sequence of SEQ ID NO:1553; (ss) the light chain variable domain comprises the amino acid sequence of SEQ ID NO:1630 and the heavy chain variable domain comprises the amino acid sequence of SEQ ID NO:1638; (tt) the light chain variable domain comprises the amino acid sequence of SEQ ID NO:1631 and the heavy chain variable domain comprises the amino acid sequence of SEQ ID NO:1553; (uu) the light chain variable domain comprises the amino acid sequence of SEQ ID NO:1549 and the heavy chain variable domain comprises the amino acid sequence of SEQ ID NO:1551; (vv) the light chain variable domain comprises the amino acid sequence of SEQ ID NO:1632 and the heavy chain variable domain comprises the amino acid sequence of SEQ ID NO:1639; (ww) the light chain variable domain comprises the amino acid sequence of SEQ ID NO:1549 and the heavy chain variable domain comprises the amino acid sequence of SEQ ID NO:1640; (xx) the light chain variable domain comprises the amino acid sequence of SEQ ID NO:1550 and the heavy chain variable domain comprises the amino acid sequence of SEQ ID NO:1551; (yy) the light chain variable domain comprises the amino acid sequence of SEQ ID NO:1633 and the heavy chain variable domain comprises the amino acid sequence of SEQ ID NO:1551; (zz) the light chain variable domain comprises the amino acid sequence of SEQ ID NO:1634 and the heavy chain variable domain comprises the amino acid sequence of SEQ ID NO:1642; (aaa) the light chain variable domain comprises the amino acid sequence of SEQ ID NO:1635 and the heavy chain variable domain comprises the amino acid sequence of SEQ ID NO:1644; or (bbb) the light chain variable domain comprises the amino acid sequence of SEQ ID NO:1636 and the heavy chain variable domain comprises the amino acid sequence of SEQ ID NO:1645. In any of the above embodiments, the light chain variable domain and/or heavy chain variable domain comprises an amino acid sequence with at least about 90% homology to the amino acid sequence indicated.

[0337] In some embodiments, the antibody is an antibody disclosed in Tables 2A, 2B, 3A, 3B, 4A, 4B, 7A and 7B of PCT Patent Application Publication No. WO2017/062672A1, reproduced below as TABLES D1-D8.

TABLE D1
EU or Kabat light chain HVR sequences

| Ab ID | HVRL1 | HVRL2 | HVRL3 |
|---|---|---|---|
| 4D11 | RASENIYSFLA | NSKTFAE | QHHYGTPPWT |
| | (SEQ ID NO: 829) | (SEQ ID NO: 844) | (SEQ ID NO: 854) |
| 78C5 | RASENIYSFLA | NSKTFAE | QHHYGTPPWT |
| | (SEQ ID NO: 829) | (SEQ ID NO: 844) | (SEQ ID NO: 854) |
| 6G12 | KSSQSLLYSSNQKNCLA | WAFTRES | QQYYSYPLT |
| | (SEQ ID NO: 830) | (SEQ ID NO: 845) | (SEQ ID NO: 855) |
| 8F11 | KSSQSLLYSSNQKNCLA | LVSKLDS | MQGTHFPLT |
| | (SEQ ID NO: 830) | (SEQ ID NO: 846) | (SEQ ID NO: 856) |
| 8E10 | KSSQSLLDSDGKTYLN | LVSKLDS | WQGTHFPYT |
| | (SEQ ID NO: 832) | (SEQ ID NO: 846) | (SEQ ID NO: 857) |
| 7E5 | KSSQSLLYSNGKTFLS | LVSKLDS | MQGTHFPLT |
| | (SEQ ID NO: 831) | (SEQ ID NO: 846) | (SEQ ID NO: 856) |
| 7F8 | SASSSVSYMY | LTSILAS | QQWSFNPYT |
| | (SEQ ID NO: 833) | (SEQ ID NO: 847) | (SEQ ID NO: 858) |
| 8F8 | RSSQSLVHSNGNTYLH | KVSNRFS | SQSTHVPLT |
| | (SEQ ID NO: 834) | (SEQ ID NO: 848) | (SEQ ID NO: 859) |
| H7 | SASSSVSYMY | LTSILAS | QQWSFNPYT |
| | (SEQ ID NO: 833) | (SEQ ID NO: 847) | (SEQ ID NO: 858) |
| 2H8 | SASSSVSYMY | LTSILAS | QQWSFNPYT |
| | (SEQ ID NO: 833) | (SEQ ID NO: 847) | (SEQ ID NO: 858) |
| 3A2 | RSSQTIIHSNGNTYLE | KVSNRFS | FQGSHVPYT |
| | (SEQ ID NO: 835) | (SEQ ID NO: 848) | (SEQ ID NO: 860) |
| 3A7 | KSSQSLLYSNGKTFLS | LVSKLDS | MQGTHFPLT |
| | (SEQ ID NO: 831) | (SEQ ID NO: 846) | (SEQ ID NO: 856) |
| 3B10 | KSSQSLLYSSDQKNYLA | WASTRES | QQYYSYPLT |
| | (SEQ ID NO: 836) | (SEQ ID NO: 849) | (SEQ ID NO: 855) |
| 4F11 | RSSQTIIHSNGNTYLE | KVSNRFS | FQGSHVPYT |
| | (SEQ ID NO: 835) | (SEQ ID NO: 848) | (SEQ ID NO: 860) |
| 6H6 | KSSQSVFYSSNQKNYLA | WASTRES | HQYLSSLT |
| | (SEQ ID NO: 1401) | (SEQ ID NO: 849) | (SEQ ID NO: 1402) |
| 7A9 | RASENIYSYLA | KAKTLAE | QHHYGTPFT |
| | (SEQ ID NO: 837) | (SEQ ID NO: 850) | (SEQ ID NO: 861) |
| 8A1 | RTSENVYSNLA | AATNLAD | HHFWGTPYT |
| | (SEQ ID NO: 838) | (SEQ ID NO: 851) | (SEQ ID NO: 862) |
| 9F5 | RSSQSLVHSNGYTYLH | KVSNRFS | SQSTRVPYT |
| | (SEQ ID NO: 839) | (SEQ ID NO: 848) | (SEQ ID NO: 863) |
| 9G1 | RFSQSLVHSNGNTYLH | KVSNRFS | SQSTRVPPT |
| | (SEQ ID NO: 840) | (SEQ ID NO: 848) | (SEQ ID NO: 864) |
| 9G3 | KASSNVNYMS | FTSNLPS | SGEVTQFT |
| | (SEQ ID NO: 841) | (SEQ ID NO: 852) | (SEQ ID NO: 865) |
| 10A9 | RSSQTIIHSNGNTYLE | KVSNRFC | FQGSHVPYT |
| | (SEQ ID NO: 835) | (SEQ ID NO: 853) | (SEQ ID NO: 860) |
| 11A8 | KSSQSLLNSGNQKKYLT | WASTRES | QNDYGFPLT |
| | (SEQ ID NO: 842) | (SEQ ID NO: 849) | (SEQ ID NO: 866) |
| 12D9 | KSSQSLLYSGNQKNFLA | WASTRES | QQYYSYPFT |
| | (SEQ ID NO: 843) | (SEQ ID NO: 849) | (SEQ ID NO: 867) |
| 12F9 | KSSQSLLYSSDQKNYLA | WASTRES | QQYYSYPLT |
| | (SEQ ID NO: 836) | (SEQ ID NO: 849) | (SEQ ID NO: 855) |
| 10C1 | KSSQSVFYSSNQKNYLA | WASTRES | HQYLSSLT |
| | (SEQ ID NO: 1401 | (SEQ ID NO: 849) | (SEQ ID NO: 1402) |
| 7E9 | KSSQSLLYSSNQKNCLA | WASTRES | QQYYSYPLT |
| | (SEQ ID NO: 830) | (SEQ ID NO: 849) | (SEQ ID NO: 855) |
| 8C3 | RS SQSLVHSNGNTYLH | KVSNRFS | SQSTHVPPT |
| | (SEQ ID NO: 834) | (SEQ ID NO: 848) | (SEQ ID NO: 1403) |
| IB4v1 | SQDVSTTVA | SASYRYT | QQHYSTPPT |
| | (SEQ ID NO: 1510) | (SEQ ID NO: 1515) | (SEQ ID NO: 1518) |
| IB4v2 | SQSLVHSNGNTYLH | KVSNRVS | SQSTHVPLT |
| | (SEQ ID NO: 1554) | (SEQ ID NO: 1559) | (SEQ ID NO: 859) |
| 6H2 | SQSIVHSNGNTYLE | KVSNRFS | FQGSHVPFT |
| | (SEQ ID NO: 1511) | (SEQ ID NO: 848) | (SEQ ID NO: 1519) |
| 7B11 | SQGVSTAVA | WASTRHT | HQHYSTYT |
| | (SEQ ID NO: 1512) | (SEQ ID NO: 1516) | (SEQ ID NO: 1520) |
| 18D8 | SQDVRTAVA | SASYRYT | QQHYGTPPWT |
| | (SEQ ID NO: 1513) | (SEQ ID NO: 1515) | (SEQ ID NO: 1521) |
| 18E4v1 | SENVVTYVS | GASNRYT | GQGYSYPYT |
| | (SEQ ID NO: 1514) | (SEQ ID NO: 1517) | (SEQ ID NO: 1522) |
| 18E4v2 | SQSLVHSNGNTYLH | KVSDRFS | SQSTHVPLT |
| | (SEQ ID NO: 1554) | (SEQ ID NO: 1560) | (SEQ ID NO: 859) |
| 29F6v1 | SQDVRTAVA | SASYRYT | QQHYGTPPWT |
| | (SEQ ID NO: 1513) | (SEQ ID NO: 1515) | (SEQ ID NO: 1521) |
| 29F6v2 | SQSLVHSNGDTYLH | KVSNRFS | SQSTHVPLT |
| | (SEQ ID NO: 1555) | (SEQ ID NO: 848) | (SEQ ID NO: 859) |
| 40D5 | SQDVRTAVA | SASYRYT | QQHYGTPPWT |
| | (SEQ ID NO: 1513) | (SEQ ID NO: 1515) | (SEQ ID NO: 1521) |
| 43B9 | SQDVRTAVA | SASYRYT | QQHYGTPPWT |
| | (SEQ ID NO: 1513) | (SEQ ID NO: 1515) | (SEQ ID NO: 1521) |
| 44A8v1 | SQDVSTTVA | SASYRYT | QQHYSTPPT |
| | (SEQ ID NO: 1510) | (SEQ ID NO: 1515) | (SEQ ID NO: 1518) |
| 44A8v2 | SESVDYHGTSLMQ | AASNVES | QQNRKILWT |
| | (SEQ ID NO: 1556) | (SEQ ID NO: 1561) | (SEQ ID NO: 1564) |
| 44B4v1 | SQDVRTAVA | SASYRYT | QQHYGTPPWT |
| | (SEQ ID NO: 1513) | (SEQ ID NO: 1515) | (SEQ ID NO: 1521) |
| 44B4v2 | SENIZYSLA | NANSLED | KQAYDVPWT |
| | (SEQ ID NO: 1557) | (SEQ ID NO: 1562) | (SEQ ID NO: 1565) |
| 29F7 | RASQSIGTSIH | FASESIS | QQTNTWPIT |
| | (SEQ ID NO: 1558) | (SEQ ID NO: 1563) | (SEQ ID NO: 1566) |
| 32G1 | RSSQSLVHSNGNTYLH | KVSNRFS | SQSTHVPLT |
| | (SEQ ID NO: 834) | (SEQ ID NO: 848) | (SEQ ID NO: 859) |

TABLE D2
EU or Kabat light chain HVR consensus sequences

| | HVR 1,1 |
|---|---|
| Consensus 1 | RXSENXYSXLA (SEQ ID NO: 1646) |
| Consensus 2 | RSSQXXXHSNGXTYLX (SEQ ID NO: 1647) |
| Consensus 3 | KSSQSXXXSXXQKXXLX (SEQ ID NO: 1648) |

TABLE D3
EU or Kabat heavy chain HVR sequences

| Ab ID | HVR H1 | HVR H2 | HVR H3 |
|---|---|---|---|
| 4D11 | FTLSSYAMS | VASISRGGSTYYP | TRGYGYYRTPFAN |
| | (SEQ ID NO: 868) | (SEQ ID NO: 886) | (SEQ ID NO: 905) |
| 78C5 | FTLSSYAMS | VASISRGGSTYYP | TRGYGYYRTPFAN |
| | (SEQ ID NO: 868) | (SEQ ID NO: 886) | (SEQ ID NO: 905) |
| 6G12 | YTFTEYTMH | IGGINPNNGGTSYS | ARGGSHYYAMDY |
| | (SEQ ID NO: 869) | (SEQ ID NO: 887) | (SEQ ID NO: 906) |
| 8E10 | YTFTDYEMH | IGVIDPETGGTAYN | TSPDYYGSSYPLYYAMDY |
| | (SEQ ID NO: 870) | (SEQ ID NO: 888) | (SEQ ID NO: 907) |
| 7E5 | FTFSDAWMG | VAEIRDKVKNHATYYA | RLGVFDY (SEQ ID NO: 908) |
| | (SEQ ID NO: 871) | (SEQ ID NO: 889) | |
| 7F8 | FSFNTYAMN | IARIRSKSNNYATYYA | VRHGDGNLWYIDV |
| | (SEQ ID NO: 872) | (SEQ ID NO: 890) | (SEQ ID NO: 909) |
| 8F8 | YTVSRYWMH | IGRIDPNSGGTKYN | VLTGTDFDY |
| | (SEQ ID NO: 873) | (SEQ ID NO: 891) | (SEQ ID NO: 910) |
| 1H7 | FSFNTYAMN | IARIRSKSNNYATYY | VRHGDGNLWYIDV |
| | (SEQ ID NO: 872) | A (SEQ ID NO: 890) | (SEQ ID NO: 909) |
| 2H8 | FSFNTYAMN | IARIRSKSNNYATYY | VRHGDGNLWYIDV |
| | (SEQ ID NO: 872) | A (SEQ ID NO: 890) | (SEQ ID NO: 909) |
| 3A2 | YPFSNFWIT | IGDIYPGSDNSNYN | AREAYYTNPGFAY |
| | (SEQ ID NO: 874) | (SEQ ID NO: 892) | (SEQ ID NO: 911) |
| 3A7 | FTFSDAWMG | VAEIRDKVKNHATYYA | RLGVFDY (SEQ ID NO: 908) |
| | (SEQ ID NO: 871) | (SEQ ID NO: 889) | |
| 3B10 | LTSNTYTQT | ESVIRSKSNNFSTLYA | VRHKSNRYPGVY |
| | (SEQ ID NO: 875) | (SEQ ID NO: 893) | (SEQ ID NO: 912) |
| 4F11 | YPFSNFWIT | IGDIYPGSDNSNYN | AREAYYTNPGFAY |
| | (SEQ ID NO: 874) | (SEQ ID NO: 892) | (SEQ ID NO: 911) |
| 6H6 | FTFSDAWMD | VAEIRNKVNNHATYYA | TSLYDGYYLRFAY |
| | (SEQ ID NO: 876) | (SEQ ID NO: 894) | (SEQ ID NO: 913) |
| 7A9 | FTFNTYSMN | VAHIKTKZNNFATFYA | VZHZSNNYPFAY |
| | (SEQ ID NO: 877) | (SEQ ID NO: 895) | (SEQ ID NO: 914) |
| 7B3 | YTFTTYWIH | IGRNDPNSGGSNYN | VRTNWDGDF |
| | (SEQ ID NO: 878) | (SEQ ID NO: 896) | (SEQ ID NO: 915) |
| 8A1 | YAFSNYWMS | IGQIYPGDGDTKYN | SREKGADYYGSTYSAWFSY |
| | (SEQ ID NO: 879) | (SEQ ID NO: 897) | (SEQ ID NO: 916) |
| 9F5 | YAFSSSWMN | IGRIYPGDGDTNYN | ARLLRNQPGESYAMDY |
| | (SEQ ID NO: 880) | (SEQ ID NO: 898) | (SEQ ID NO: 917) |
| 9F5a | YAFSSSWMN | RIYPGDGDTNYNGEFRV | ARLLRNQPGESYAMDY |
| | (SEQ ID NO: 880) | (SEQ ID NO: 1708) | (SEQ ID NO: 917) |
| 9G1 | YIFTTYWIH | IGRIDPNNGDTNYN | VMTGTDFDY |
| | (SEQ ID NO: 881) | (SEQ ID NO: 899) | (SEQ ID NO: 918) |
| 9G3 | FNFNTYAMK | IARIRSNSNDYATNYS | VGHKINNYPFAH |
| | (SEQ ID NO: 882) | (SEQ ID NO: 900) | (SEQ ID NO: 919) |
| 10A9 | YPFSNFWIT | IGDIYPGSDNRNFN | AREAYYTNPGFAY |
| | (SEQ ID NO: 874) | (SEQ ID NO: 901) | (SEQ ID NO: 911) |
| 11A8 | FNFNTYAMN | VARIRSKSNNYATYYA | VRHYSNYGWGFAY |
| | (SEQ ID NO: 883) | (SEQ ID NO: 902) | (SEQ ID NO: 920) |
| 12D9 | YTFSDYYIH | IGYIYPNNGDNGYN | ARRGYYGGSYDY |
| | (SEQ ID NO: 884) | (SEQ ID NO: 903) | (SEQ ID NO: 921) |
| 12F9 | FRFNTYAMT | EGVIRRKSSNFATLYA | VRHKSNKYPFVY |
| | (SEQ ID NO: 885) | (SEQ ID NO: 904) | (SEQ ID NO: 922) |
| 10C1 | FTFSDAWMD | VAEIRNKINNHATYYA | TSLYDGSYLRFAY |
| | (SEQ ID NO: 876) | (SEQ ID NO: 1405) | (SEQ ID NO: 1408) |
| 7E9 | YTFTEYTMH | IGGINPNNGGTSYK | ARGGSHYYAMDY |
| | (SEQ ID NO: 869) | (SEQ ID NO: 1406) | (SEQ ID NO: 906) |
| 8C3 | YSFTGYYMH | IGRVNPNNGGTSYN | VLTGGYFDY |
| | (SEQ ID NO: 1404) | (SEQ ID NO: 1407) | (SEQ ID NO: 1409) |
| 1B4 | SRFTFSSYAMS | VAAISGGGRYTYYP | ARHYDGYLDY |
| | (SEQ ID NO: 1523) | (SEQ ID NO: 1526) | (SEQ ID NO: 1529) |
| 6H2 | SAFSLTNYAVH | LGVIWSGGSTAFN | ATHYYRSTYAFSY |
| | (SEQ ID NO: 1524) | (SEQ ID NO: 1527) | (SEQ ID NO: 1530) |
| 7B11v1 | SRFTFSSYAMS | VAAISGGGRYTYYP | ARHYDGYLDY |
| | (SEQ ID NO: 1523) | (SEQ ID NO: 1526) | (SEQ ID NO: 1529) |
| 7B11v2 | SGYTFTDFYMN | IGDINPNNGHTTYN | AREPYSYGSSPWYFLV |
| | (SEQ ID NO: 1567) | (SEQ ID NO: 1575) | (SEQ ID NO: 1583) |
| 18D8 | SRFTFSSYAMS | VAAISGGGRYTYYP | ARHYDGYLDY |
| | (SEQ ID NO: 1523) | (SEQ ID NO: 1526) | (SEQ ID NO: 1529) |
| 18E4v1 | SRFTFSSYAVS | VATISGGGRYTYYP | ARHYDGYLDY |
| | (SEQ ID NO: 1525) | (SEQ ID NO: 1528) | (SEQ ID NO: 1529) |
| 18E4v2 | SGYTFTAYWMH | IGRTHPSDSDTNYN | ATYSNYVTGAMDS |
| | (SEQ ID NO: 1568) | (SEQ ID NO: 1576) | (SEQ ID NO: 1584) |
| 29F6v1 | SRFTFSSYAMS | VAAISGGGRYTYYP | ARHYDGYLDY |
| | (SEQ ID NO: 1523) | (SEQ ID NO: 1526) | (SEQ ID NO: 1529) |
| 29F6v2 | SGFNIKNTYIH | IGRIDPAIGNTNYA | VSPGMDY |
| | (SEQ ID NO: 1569) | (SEQ ID NO: 1577) | (SEQ ID NO: 1585) |
| 40D5v1 | SRFTFSSYAMS | VAAISGGGRYTYYP | ARHYDGYLDY |
| | (SEQ ID NO: 1523) | (SEQ ID NO: 1526) | (SEQ ID NO: 1529) |
| 40D5v2 | SGYTFTNYWIH | IGRIHPSDSDINYN | VKTGTSFAS |
| | (SEQ ID NO: 1570) | (SEQ ID NO: 1578) | (SEQ ID NO: 1586) |
| 43B9 | SRFTFSSYAMS | VAAISGGGRYTYYP | ARHYDGYLDY |
| | (SEQ ID NO: 1523) | (SEQ ID NO: 1526) | (SEQ ID NO: 1529) |
| 44A8 | SRFTFSSYAMS | VAAISGGGRYTYYP | ARHYDGYLDY |
| | (SEQ ID NO: 1523) | (SEQ ID NO: 1526) | (SEQ ID NO: 1529) |
| 44B4v1 | SRFTFSSYAMS | VAAISGGGRYTYYP | ARHYDGYLDY |
| | (SEQ ID NO: 1523) | (SEQ ID NO: 1526) | (SEQ ID NO: 1529) |
| 44B4v2 | SGYTFTSATMH | IGYINPNSGYSKYN | ARWGIDGNYGGGFFDV |
| | (SEQ ID NO: 1571) | (SEQ ID NO: 1579) | (SEQ ID NO: 1587) |
| 45D6 | YSFTDYNIH | IGYINPNSDNTRYI | TRGFSNLGAMDY |
| | (SEQ ID NO: 1572) | (SEQ ID NO: 1580) | (SEQ ID NO: 1588) |
| 29F7 | FTLSNYWMN | VAQIRLKSDNYATHYA | TGAGGNHENY |
| | (SEQ ID NO: 1573) | (SEQ ID NO: 1581 | (SEQ ID NO: 1589) |
| 32G1 | YTFTDYNIH | IGYINPNNGGTTYN | ATTYVSFSY |
| | (SEQ ID NO: 1574) | (SEQ ID NO: 1582 | (SEQ ID NO: 1590) |

TABLE D4
EU or Kabat heavy chain HVR consensus sequences

| | HVR H1 | HVR H2 |
|---|---|---|
| Consensus 1 | YX₁X₂X₃XYXXH | IGXXXPX₁X₂X₃X₄X₅XYX₆ |
| | X₁ is T or S | X₁ is N or E |
| | X₂ is F or V | X₂ is N, S, or T |
| | X₃ is T or S | X₃ is G or D |
| | (SEQ ID NO: 1649) | X₄ is G, D, or N |
| | | X₅ is T, S, or N |
| | | X₆ is N, 5, K, or I |
| | | (SEQ ID NO: 1656) |
| Consensus 2 | YTFTXYXXH | IGXXXPNNGGTXYN (SEQ ID NO: 1657) |
| | (SEQ ID NO: 1650) | |
| Consensus 3 | FTFSDAWMX₁ | VAEIRX₁KX₂X₃NHATYYA |
| | X₁ is D or G (SEQ ID NO: 1651) | X₁ is N or D |
| | | X₂ iS V or I |
| | | X₃ is N or K (SEQ ID NO: 1658) |
| Consensus 4 | FXX₁X₂X₃YX₄MX₅ | XX₁XIX₂X₃X₄X₅X₆X₇X₈ATXYX₉ |
| | x₁ is F or L | X₁ is A or G |
| | X₂ is N or S | X₂ is R or K |
| | X₃ is T or N | X₃ is S, T, R, or L |
| | X₄ is A, S, or W | X₄ is K or N |
| | X₅ is N, K, or T | X₅ is S, E, or Q |
| | (SEQ ID NO: 1652) | X₆ is N, S, or D |
| | | X₇ is N or D |
| | | X₈ is Y or F |
| | | X₉ is A or S (SEQ ID NO: 1659) |
| Consensus 5 | FXFNTYAMN | XAXIRSKSNNYATXYA |
| | (SEQ ID NO: 1653) | (SEQ ID NO: 1660) |
| Consensus 6 | YXFX₁X₂XWX₃X | IGXIX₁PX₂XX₃X₄X₅X₆X₇N |
| | X₁ is S or T | X₁ is Y or D |
| | X₂ is N, S, or T | X₂ is G or N |
| | X₃ iS I or M (SEQ ID NO: 1654) | X₃ is G or D |
| | | X₄ is N or D |
| | | X₅ is T, R, or S |
| | | X₆ is N or K |
| | | X₇ is Y or F (SEQ ID NO: 1661) |
| Consensus 7 | YXFSNMVIX | IGXIYPGXGDTNYN (SEQ ID NO: 1662) |
| | (SEQ ID NO: 1655) | |

TABLE D5
EU or Kabat light chain Framework sequences

| Ab ID | VL FR1 | VL FR2 | VL FR3 | VL FR4 |
|---|---|---|---|---|
| 4D11 | DIZVTQSPASLSAS | WYQLKQGKSPQ | GVPSRFSGSGSGTQFS | FGGGTKLEIK |
| | VGETVTITC | LLVY | LRINSLQPEDFGSYYC | (SEQ ID NO: 968) |
| | (SEQ ID NO: 923) | (SEQ ID NO: 940) | (SEQ ID NO: 950) | |
| 78C5 | DIZVTQSPASLSAS | WYQLKQGKSPQ | GVPSRFSGSGSGTQFS | FGGGTKLEIK |
| | VGETVTITC | LLVY | LRINSLQPEDFGSYYC | (SEQ ID NO: 968) |
| | (SEQ ID NO: 923) | (SEQ ID NO: 940) | (SEQ ID NO: 950) | |
| 6G12 | TMSQSPSSLAVSV | WYQQKPGQSPK | GVPDRFTGSGSGTDF | FGAGTKLELK |
| | GEKVTMSC | LLIY | TLTISSVKAEDLAVY | (SEQ ID NO: 969) |
| | (SEQ ID NO: 924) | (SEQ ID NO: 941) | YC (SEQ ID NO: 951) | |
| 8F11 | DVZMTQTPLTLSV | WLLQRPGQSPK | GVPDRFAGSGSGTDF | FGAGTKLELK |
| | TIGQPASISC | RLIY | TLKISRLEADDLGIYY | (SEQ ID NO: 969) |
| | (SEQ ID NO: 925) | (SEQ ID NO: 942) | C (SEQ ID NO: 952) | |
| 8E10 | DVZMTQTPLTLSV | WLLQRPGQSPK | GVPDRFTGSGSGTDF | FGGGTKLEIK |
| | TIGQPASISC | RLIY | TLKISRVEAEDLGVY | (SEQ ID NO: 968) |
| | (SEQ ID NO: 925) | (SEQ ID NO: 942) | YC (SEQ ID NO: 953) | |
| 7E5 | DVZMTQTPLTLSV | WLLQRPGQSPK | GVPDRFAGSGSGTDF | FGAGTKLELK |
| | TIGQPASISC | RLIY | TLKISRLEADDLGIYY | (SEQ ID NO: 969) |
| | (SEQ ID NO: 925) | (SEQ ID NO: 942) | C (SEQ ID NO: 952) | |
| 7E5v2 | DVVMTQTPLTLSV | WLLQRPGQSPK | GVPDRFAGSGSGTDF | FGAGTKLELK |
| | TIGQPASISC | RLIY | TLKISRLEADDLGIYY | (SEQ ID NO: 969) |
| | (SEQ ID NO: 931) | (SEQ ID NO: 942) | C (SEQ ID NO: 952) | |
| 7F8 | VLTQSPALMSASP | WYQQKPRSSPK | GVPARFSGSGSGTSY | FGGGTKLVIK |
| | GEKVTMTC | PWIY | SLTINNMEAEDAATY | (SEQ ID NO: 970) |
| | (SEQ ID NO: 926) | (SEQ ID NO: 943) | YC (SEQ ID NO: 954) | |
| 8F8 | DVZMTQTPLSLPV | WYLQKPGQSPK | GVPDRFSGSGSGTDF | FGAGTKLELK |
| | SLGDQASISC | LLIY | TLKISRVEAEDLGVY | (SEQ ID NO: 969) |
| | (SEQ ID NO: 927) | (SEQ ID NO: 944) | FC (SEQ ID NO: 955) | |
| 1H7 | VLTQSPAIMZASP | WYQQKPRSSPK | GVPARFSGSGSGTSY | FGGGTKLVIK |
| | GEKVTMTC | PWIY | SLTISSMEAEDAATY | (SEQ ID NO: 970) |
| | (SEQ ID NO: 928) | (SEQ ID NO: 943) | YC (SEQ ID NO: 956) | |
| 2H8 | NVLTQSPALMSAS | WYQQKPRSSPK | GVPARFSGSGSGTSY | FGGGTKLVIK |
| | PGEKVTMTC | PWIY | SLTISSMEAEDAATY | (SEQ ID NO: 970) |
| | (SEQ ID NO: 929) | (SEQ ID NO: 943) | YC (SEQ ID NO: 956) | |
| 3A2 | DVVMTQTPLSLPV | WYLRKPGQSPK | GVPDRFSGSGSGTDF | FGGGTELEIK |
| | SLGDQASISC | LLIY | TLKISRVEAEDLGVY | (SEQ ID NO: 971) |
| | (SEQ ID NO: 930) | (SEQ ID NO: 945) | YC (SEQ ID NO: 957) | |
| 3A7 | DVVMTQTPLTLSV | WLLQRPGQSPK | GVPDRFAGSGSGTDF | FGGGTKLEMK |
| | TIGQPASISC | RLIY | TZKISRLEADDLGIYY | (SEQ ID NO: 972) |
| | (SEQ ID NO: 931) | (SEQ ID NO: 942) | C (SEQ ID NO: 958) | |
| 3B10 | ITMSQSPSSLAVSV | WYQQKPGQSPK | GVPDRFTGSGSGTDF | FGAGTKLELK |
| | GEKVTMSC | LLIY | TLTISSVKAEDLAVY | (SEQ ID NO: 969) |
| | (SEQ ID NO: 932) | (SEQ ID NO: 941) | CC (SEQ ID NO: 959) | |
| 4F11 | DVZMTQTPLSLPV | WYLRKPGQSPK | GVPDRFSGSGSGTDF | FGGGTELEIK |
| | SLGDQASISC | LLIY | TLKISRVEGEDLGVY | (SEQ ID NO: 971) |
| | (SEQ ID NO: 927) | (SEQ ID NO: 945) | YC (SEQ ID NO: 960) | |
| 6H6 | QTQSPSSLAVSAG | WYQQKPGQSPK | GVPDRFTGSGFGTDF | FGAGTKLELK |
| | EKVTLSC | LLIS | TLTISSVQGEDLAVY | (SEQ ID NO: 969) |
| | (SEQ ID NO: 1410) | (SEQ ID NO: 1413) | YC (SEQ ID NO: 1414) | |
| 7A9 | QMSQSPACLZAZV | WYQQKQGKSPK | GVPSRFSGRGSGTQF | FGSGTKLEIK |
| | GESVTITC | LVVY | FLKINSZQREDFGSY | (SEQ ID NO: 973) |
| | (SEQ ID NO: 933) | (SEQ ID NO: 946) | YC (SEQ ID NO: 961) | |
| 8A1 | DIQMTQSPASLSVS | WYQQKQGKSPQ | GVPSRFSASGSATQFS | FGGGTKLEMN |
| | VGETVTITC | LLVY | LKINSLQSADFGSYY | (SEQ ID NO: 974) |
| | (SEQ ID NO: 934) | (SEQ ID NO: 947) | C (SEQ ID NO: 962) | |
| 9F5 | DVZMTQNPLSLPV | WYLQKPGQSPK | GVPDRFSGSGSGTDF | FGGGTKLEIK |
| | SLGDQASISC | LLIY | TLKISRVEADDLGVY | (SEQ ID NO: 968) |
| | (SEQ ID NO: 935) | (SEQ ID NO: 944) | LC (SEQ ID NO: 963) | |
| 9F5v2 | DVVMTQTPLSLPV | WYLQKPGQSPK | GVPDRFSGSGSGTDF | FGGGTKLEIK |
| | SLGDQASISC | LLIY | TLKISRVEADDLGVY | (SEQ ID NO: 968) |
| | (SEQ ID NO: 930) | (SEQ ID NO: 944) | FC (SEQ ID NO: 1668) | |
| 9G1 | DVLMTQTPLSLPV | WYLQKPGQSPK | GVPDRFSGSGSGTDF | FGGGTKLEIK |
| | SLGDQASISC | LLIY | TLRISGVEAEDLGVY | (SEQ ID NO: 968) |
| | (SEQ ID NO: 936) | (SEQ ID NO: 944) | FC (SEQ ID NO: 964) | |
| 9G3 | NVLTQSPALIWAZ | WXXXKPRSSPK | GVPGRFSGSGSGTYX | FGGGTKLEMK |
| | PGEKVTMTC | PGIY | SFKISSMEGKMGPLII | (SEQ ID NO: 975) |
| | (SEQ ID NO: 937) | (SEQ ID NO: 948) | FC (SEQ ID NO: 965) | |
| 10A9 | DVVMTQTPLSLPV | WYLRKPGQSPK | GVPDRFSGSGSGTDF | FGGGTELEIK |
| | SLGDQASISC | LLIY | TLKISRVEAEDLGVY | (SEQ ID NO: 971) |
| | (SEQ ID NO: 930) | (SEQ ID NO: 945) | YC (SEQ ID NO: 957) | |
| 11A8 | DIZMTQSPSSLTVT | WYQQKPGQPZK | GVRDRFTGSGZGTDF | FGGGTKLEMK |
| | AGEKVTMSC | LLIY | TLTISSVQGEDLAIYY | (SEQ ID NO: 972) |
| | (SEQ ID NO: 938) | (SEQ ID NO: 949) | C (SEQ ID NO: 966) | |
| 12D9 | TQSPSSLAVSVGE | WYQQKPGQSPK | GVPDRFTGSGSGTDF | FGSGTKLEIK |
| | KVTMTC | LLIY | TLTISTVKAEDLAVY | (SEQ ID NO: 973) |
| | (SEQ ID NO: 939) | (SEQ ID NO: 941) | YC (SEQ ID NO: 967) | |
| 12F9 | TMSQSPSSLAVSV | WYQQKPGQSPK | GVPDRFTGSGSGTDF | FGAGTKLELK |
| | GEKVTMSC | LLIY | TLTISSVKAEDLAVY | (SEQ ID NO: 969) |
| | (SEQ ID NO: 924) | (SEQ ID NO: 941) | CC (SEQ ID NO: 959) | |
| 10C1 | QTQVFLSLLLWVS | WYQQKPGQSPK | GVPDRFTGSGSGTDF | FGAGTKLELK |
| | GTCGNIMLTQSPSS | LLIS | TLTINSVQAEDLAVY | (SEQ ID NO: 969) |
| | LAVSAGEKVTLSC | (SEQ ID NO: 1413) | YC (SEQ ID NO: 1415) | |
| | (SEQ ID NO: 1411) | | | |
| 7E9 | DIVMSQSPSSLAVS | WYQQKPGQSPK | GVPDRFTGSGSGTDF | FGAGTKLELK |
| | VGEKVTMSC | LLIY | TLTISSVKAEDLAVY | (SEQ ID NO: 969) |
| | (SEQ ID NO: 1412) | (SEQ ID NO: 941) | YC (SEQ ID NO: 951) | |
| 8C3 | DVVMTQTPLSLPV | WYLQKPGQSPK | GVPDRFSGSGSGTDF | FGSGTKLEIK |
| | SLGDQASISC | LLIY | TLKISRVEAEDLGVY | (SEQ ID NO: 973) |
| | (SEQ ID NO: 930) | (SEQ ID NO: 944) | FC (SEQ ID NO: 955) | |
| IB4v1 | DIVMTQSHKFMST | WYQQKPGQSPK | GVPDRFTGSGFGTDF | FGGGTKLEIK |
| | SVGDRVSITCKA | LLIY | TFTISSVQAEDLAVY | (SEQ ID NO: 968) |
| | (SEQ ID NO: 1531) | (SEQ ID NO: 941) | YC (SEQ ID NO: 1535) | |
| IB4v2 | ZVVZTQTPLSLPVS | WFLQKPGQSPK | GVPDRFSGSGSGTDF | FGAGTKLELK |
| | LGDQASFSCRS | LLIF | TLKISRVEAEDLGVY | (SEQ ID NO: 969) |
| | (SEQ ID NO: 1591) | (SEQ ID NO: 1597) | FC (SEQ ID NO: 955) | |
| 6H2 | DVLMTQTPLSLPV | WYLQKPGQSPK | GVPDRFSGSGSGTDF | FGSGTKLEIK |
| | SLGDQASISCRS | LLIY | TLKISRVEAEDLGVY | (SEQ ID NO: 973) |
| | (SEQ ID NO: 1532) | (SEQ ID NO: 944) | YC (SEQ ID NO: 957) | |
| 7B11 | DIVMTQSHKFMST | WYQQKPGQSPK | GVPDRFTGSGSGTDY | FGGGTKLEIK |
| | SVGDRVSITCKA | LLIY | TLTISSVQAEDLALY | (SEQ ID NO: 968) |
| | (SEQ ID NO: 1531) | (SEQ ID NO: 941) | YC (SEQ ID NO: 1536) | |
| 18D8 | DIVMTQSHKFMST | WYQQKPGQSPK | GVPDRFTGSGFGTDF | FGGGTKLEIK |
| | SIGARVSITCKA | LLIY | TFTISSVQAEDLAVY | (SEQ ID NO: 968) |
| | (SEQ ID NO: 1533) | (SEQ ID NO: 941) | YC (SEQ ID NO: 1535) | |
| 18E4v1 | DIVMTQSPKSMSM | WYQQKPGQSPK | GVPDRFTGSGSATDF | FGGGTKLEIK |
| | SVGERVTLTCKA | LLIY | TLTISSVQAEDLADY | (SEQ ID NO: 968) |
| | (SEQ ID NO: 1534) | (SEQ ID NO: 941) | HC (SEQ ID NO: 1537) | |
| 18E4v2 | NIVMTQSPKSMSM | WYQQKPGQSPK | GVPDRFTGSGSATDF | FGGGTKLEIK |
| | SVGERVTLTCKA | LLIY | TLTISSVQAEDLADY | (SEQ ID NO: 968) |
| | (SEQ ID NO: 1592) | (SEQ ID NO: 941) | HC (SEQ ID NO: 1537) | |
| 18E4v3 | DVVMTQTPLSLPV | WYLQKPGQSPK | GVPDRFSGSGSGTDF | FGAGTKLELK |
| | SLGDQASISCRS | LLIY | TLRISRVEAEDLGVY | (SEQ ID NO: 969) |
| | (SEQ ID NO: 1593) | (SEQ ID NO: 944) | FC (SEQ ID NO: 1601) | |
| 29F6v1 | DIVMTQSHKFMST | WYQQKPGQSPK | GVPDRFTGSGSGTDF | FGGGTKLEIK |
| | SIGARVSITCKA | LLIY | TFTISSVQAEDLAVY | (SEQ ID NO: 968) |
| | (SEQ ID NO: 1533) | (SEQ ID NO: 941) | YC (SEQ ID NO: 1538) | |
| 29F6v2 | DVVMTQTPLSLPV | WYLQKPGQSPK | GVPDRFSGSGSGTDF | FGAGTKLELK |
| | SLGDQASISCRS | LLIY | TLKISRVEAEDLGVY | (SEQ ID NO: 969) |
| | (SEQ ID NO: 1593) | (SEQ ID NO: 944) | FC (SEQ ID NO: 955) | |
| 40D5 | DIVMTQSHKFMST | WYQQKPGQSPK | GVPDRFTGSGSGTDF | FGGGTKLEIK |
| | SIGARVSITCKA | LLIY | TFTISSVQAEDLAVY | (SEQ ID NO: 968) |
| | (SEQ ID NO: 1533) | (SEQ ID NO: 941) | YC (SEQ ID NO: 1538) | |
| 43B9 | DIVMTQSHKFMST | WYQQKPGQSPK | GVPDRFTGSGSGTDF | FGGGTKLEIK |
| | SIGARVSITCKA | LLIY | TFTISSVQAEDLAVY | (SEQ ID NO: 968) |
| | (SEQ ID NO: 1533) | (SEQ ID NO: 941) | YC (SEQ ID NO: 1538) | |
| 44A8v1 | DIVMTQSHKFMST | WYQQKPGQSPK | GVPDRFTGSGSGTDF | FGGGTKLEIK |
| | SVGDRVSITCKA | LLIY | TFTISSVQAEDLAVY | (SEQ ID NO: 968) |
| | (SEQ ID NO: 1531) | (SEQ ID NO: 941) | YC (SEQ ID NO: 1538) | |
| 44A8v2 | DIVLTQSPASLAVS | WYQQKPGQPPK | GVPARFSGSGSGTDF | FGGGTKLEIK |
| | LGQRATISCRA | LLIY | SLNIHPVEEDDIAMY | (SEQ ID NO: 968) |
| | (SEQ ID NO: 1594) | (SEQ ID NO: 1598) | FC (SEQ ID NO: 1602) | |
| 44B4v1 | DIVMTQSHKFMST | WYQQKPGQSPK | GVPDRFTGSGSGTDF | FGGGTKLEIK |
| | SIGARVSITCKA | LLIY | TFTISSVQAEDLAVY | (SEQ ID NO: 968) |
| | (SEQ ID NO: 1533) | (SEQ ID NO: 941) | YC (SEQ ID NO: 1538) | |
| 44B4v2 | DIQMTQFPASLAA | WYQQKQGKSPQ | GVPSRFSGSGSGTQY | FGGGTKLEIK |
| | XVGESVTITCRA | LLIY | SMKINSMQPEDTAIY | (SEQ ID NO: 968) |
| | (SEQ ID NO: 1595) | (SEQ ID NO: 1599) | FC (SEQ ID NO: 1603) | |
| 29F7 | ILLTQSPAILSVSPG | WYQQRTNGSPR | GIPSRFSGSGSGTDFT | FGAGTKLELK |
| | ERVSFSC | LLIK | LNINSVESEDIADYYC | (SEQ ID NO: 969) |
| | (SEQ ID NO: 1596) | (SEQ ID NO: 1600) | (SEQ ID NO: 1604) | |
| 32G1 | DVVMTQTPLSLPV | WYLQKPGQSPK | GVPDRFSGSGSGTDF | FGAGTKLELK |
| | SLGDQASISC | LLIY | TLKISRVEAEDLGVY | (SEQ ID NO: 969) |
| | (SEQ ID NO: 930) | (SEQ ID NO: 944) | FC (SEQ ID NO: 955) | |

TABLE D6
EU or Kabat heavy chain Framework sequences

| Ab ID | VH FR1 | VH FR2 | VH FR3 | VH FR4 |
|---|---|---|---|---|
| 44D11 | EVKLVESGGGLV | WVRQTPEKRLEW | DSVQGRFTFSRDNA | WGQGTLVTVSA |
| | KPGGSLKLSCAAS | (SEQ ID NO: 995) | RNILYLQMSSLRSED | (SEQ ID NO: 1029) |
| | G (SEQ ID NO: 976) | | TAMYYC | |
| | | | (SEQ ID NO: 1008) | |
| 78C5 | EVKLVESGGGLV | WVRQTPEKRLEW | DSVQGRFTFSRDNA | WGQGTLVTVSA |
| | KPGGSLKLSCAAS | (SEQ ID NO: 995) | RNILYLQMSSLRSED | (SEQ ID NO: 1029) |
| | G (SEQ ID NO: 976) | | TAMYYC | |
| | | | (SEQ ID NO: 1008) | |
| 6G12 | EVQLQQSGPELVK | WVKQSHGKSLEW | QKFKGKASLTVDKS | WGQGTSVTVSS |
| | PGTSVKISCKTSG | (SEQ ID NO: 996) | SSTAYMELHSLASD | (SEQ ID NO: 1030) |
| | (SEQ ID NO: 977) | | DSAVYYC | |
| | | | (SEQ ID NO: 1009) | |
| 8E10 | QVQLQQSGAELV | WVKQTPVHGLEW | QKFKGKAILTADKS | WGQGTSVTVSS |
| | RPGASVTLSCKAS | (SEQ ID NO: 997) | SSTAYMELRSLTSED | (SEQ ID NO: 1030) |
| | G (SEQ ID NO: 978) | | SAVYYC | |
| | | | (SEQ ID NO: 1010) | |
| 7E5 | EVKLEESGGGLVQP | WVRQSPEKGLEW | ESVKGRFTISRDDSK | WGQGTTLTVSS |
| | GGSMKLSCAASG | (SEQ ID NO: 998) | STVYLQMNTLRADD | (SEQ ID NO: 1031) |
| | (SEQ ID NO: 979) | | TGIYYC | |
| | | | (SEQ ID NO: 1011) | |
| 7F8 | EVQLVESGGGLV | WVRQAPGKGLEW | DSVKDRITCSRDDSE | WGTGTTVTVST |
| | QPKGSLKLSCAA | (SEQ ID NO: 999) | NMFYLQLSSLKTED | (SEQ ID NO: 1032) |
| | SG | | TAMYYC | |
| | (SEQ ID NO: 980) | | (SEQ ID NO: 1012) | |
| 8F8 | QVQLQQSGAELVK | WVKQRPGRGLEW | EKFKTKATLTVDKP | WGQGTTLTVSS |
| | PGASVKLSCKASG | (SEQ ID NO: 1000) | SSTAYMQVSSLTSE | (SEQ ID NO: 1031) |
| | (SEQ ID NO: 981) | | DSAVYYC | |
| | | | (SEQ ID NO: 1013) | |
| IH7 | ZVQLVESGGGLV | WVRQAPGKGLEW | DSVKDRFTCSRDDS | WGTGTTVTVSS |
| | QPKGSLKLSCAA | (SEQ ID NO: 999) | ENMFYLQLSSLKTE | (SEQ ID NO: 1033) |
| | SG | | DTAIYYC | |
| | (SEQ ID NO: 982) | | (SEQ ID NO: 1014) | |
| 2HS | EVQLVESGGGLVQP | WVRQAPGKGLEW | DSVKDRFTCSRDDS | WGTGTTVTVSS |
| | KGSLKLSCAASG | (SEQ ID NO: 999) | ENMFYLQLSSLKTE | (SEQ ID NO: 1033) |
| | (SEQ ID NO: 980) | | DTAMYYC | |
| | | | (SEQ ID NO: 1015) | |
| 3A2 | QVQLQQSGAELVK | WVKQRPGQGLV | EKFKTKATLTVDTSS | WGQGTLVTVST |
| | PGASVKMSCKTSG | W | STAYMHLSSLTSEDS | (SEQ ID NO: 1034) |
| | (SEQ ID NO: 983) | (SEQ ID NO: 1001) | AVYFC | |
| | | | (SEQ ID NO: 1016) | |
| 3A7 | EVKLEESGGGLVQP | WVRQSPEKGLEW | ESVKGRFTISRDDSK | WGQGTTLTVSS |
| | GGSMKLSCAASG | (SEQ ID NO: 998) | STVYLQMNTLRADD | (SEQ ID NO: 1031) |
| | (SEQ ID NO: 979) | | TGIYYC | |
| | | | (SEQ ID NO: 1011) | |
| 3B10 | EVQLVZZGRGZSQ | GVPQGPGKGREW | DSVKDRFTZSRDDS | WGQGTIVTVS |
| | GKGSXZZGRAZRC | (SEQ ID NO: 1002) | ESLFYZQMSZZKZE | (SEQ ID NO: 1035) |
| | (SEQ ID NO: 984) | | DTAMYYZ | |
| | | | (SEQ ID NO: 1017) | |
| 4F11 | QVQLQQSGAELVK | WVKQRPGQGLV | EKFKTKATLTVDTSS | WGQGTLVTVST |
| | PGASVKMSCKTSG | W | STAYMHLS | (SEQ ID NO: 1034) |
| | (SEQ ID NO: 983) | (SEQ ID NO: 1001) | SLTSEDSAVYFC | |
| | | | (SEQ ID NO: 1016) | |
| 6H6 | EVKLEESGGGLVQP | WVRQSPEKGLEW | ESVKGRFTISRDDSK | WGQGTLVTVSA |
| | GGSMKLSCTASG | (SEQ ID NO: 998) | STVYLQMNSLRTED | (SEQ ID NO: 1029) |
| | (SEQ ID NO: 985) | | TGIYYC | |
| | | | (SEQ ID NO: 1018) | |
| 7A9 | LSCAASG | WVRQAPGKGLEW | DSVKDRFTISRDDSE | WGQGTLVTVSA |
| | (SEQ ID NO: 986) | (SEQ ID NO: 999) | SMLYLQMZNLKTED | (SEQ ID NO: 1029) |
| | | | TAMYYC | |
| | | | (SEQ ID NO: 1019) | |
| 7B3 | QVQLQQSGAVLVK | WVKQRPGRGPEW | EKFRNKAILTVDKPS | WGQGTTLTVSS |
| | PGASVKLSCKASG | (SEQ ID NO: 1003) | STAYMQLNSLTSED | (SEQ ID NO: 1031) |
| | (SEQ ID NO: 987) | | ZAVYYC | |
| | | | (SEQ ID NO: 1020) | |
| 8A1 | EVQLQQSGAELVK | WVKQRPGKGLEW | GKFEGKATLTADKS | WGQGTLVTVSA |
| | PGASVKISCKASG | (SEQ ID NO: 1004) | SSTAYMQLSSLTSED | (SEQ ID NO: 1029) |
| | (SEQ ID NO: 988) | | SAVYFC | |
| | | | (SEQ ID NO: 1021) | |
| 9F5 | QVQLQQSGPELVK | WVKQRPGKGLEW | GEFRVRATLTADTSS | WGQGASVTVSS |
| | PGASLKISCKASG | (SEQ ID NO: 1004) | TTAYMQLSSLTSEDS | (SEQ ID NO: 1036) |
| | (SEQ ID NO: 989) | | AVYFC | |
| | | | (SEQ ID NO: 1022) | |
| 9G1 | QVQLQQSGAELVK | WVKQRPGRGPEW | EKFKTKATLTVDKP | WGQGTTLTVSS |
| | PGASVKLSCKASG | (SEQ ID NO: 1003) | SSTADMQLSSLTSED | (SEQ ID NO: 1031) |
| | (SEQ ID NO: 981) | | SAVYYC | |
| | | | (SEQ ID NO: 1023) | |
| 9G3 | EVQLVESGGGLVQP | WVRQTPGKGLEW | DSVKDRFTISRDDSE | WGRGTLV |
| | KGSLKLSCAAFG | (SEQ ID NO: 1005) | SIVYVQMNNLKTED | (SEQ ID NO: 1037) |
| | (SEQ ID NO: 990) | | TGMYSC | |
| | | | (SEQ ID NO: 1024) | |
| 10A9 | QVQLQQSGAEVVK | WVKQRPGQGLV | ERFKTKATLTVDTSS | WGQGTLVTVSA |
| | PGASVKMSCKTSG | W | STAYMHLSSLTSEDS | (SEQ ID NO: 1029) |
| | (SEQ ID NO: 991) | (SEQ ID NO: 1001) | AVYFC | |
| | | | (SEQ ID NO: 1025) | |
| 11A8 | EVQLVESGGRLVQP | WVRQAPGKGLEW | DSVKDRFTISRDDSE | WGQGTLVTVSA |
| | KGSLKLSCAASG | (SEQ ID NO: 999) | SMLYLQMNNLKTE | (SEQ ID NO: 1029) |
| | (SEQ ID NO: 992) | | DTAMYYC | |
| | | | (SEQ ID NO: 1026) | |
| 12D9 | QVQLQQYGPELVK | WMKQSHGKSLE | QEFKGKATLTVDKS | WGQGT |
| | PGASVKMSCKVSG | W | SS | (SEQ ID NO: 1038) |
| | (SEQ ID NO: 993) | (SEQ ID NO: 1006) | TAYMELRSLTFEDS | |
| | | | AV YZC | |
| | | | (SEQ ID NO: 1027) | |
| 12F9 | WRIGQGKGSLKLA | RVRQGPGKGREW | DSVKDRFRASRDDS | WGQGTLVTVSA |
| | RAARG | (SEQ ID NO: 1007) | ES | (SEQ ID NO: 1029) |
| | (SEQ ID NO: 994) | | MLYVQMSNWKQED | |
| | | | T AMYYG | |
| | | | (SEQ ID NO: 1028) | |
| iOCi | GVQSEVKFEESGG | WVRQSPEKGLEW | ESVKGRFTISRDDSK | WGQGTLVTVSA |
| | GLVQPGGSMKLSC | (SEQ ID NO: 998) | SSVSLQMNSLRTED | (SEQ ID NO: 1029) |
| | TASG | | TGIYYC | |
| | (SEQ ID NO: 1416) | | (SEQ ID NO: 1419) | |
| 7E9 | QVQLQQSGPELVK | WVKQSHGKSLEW | QKFKGKATLTVDRS | WGQGTSVTVSS |
| | PGASVKISCKTSG | (SEQ ID NO: 996) | SSTAYMELRSLTSED | (SEQ ID NO: 1030) |
| | (SEQ ID NO: 1417) | | SAVYYC | |
| | | | (SEQ ID NO: 1420) | |
| SC3 | QVQLQQSGPDLVKP | WVKQSHGKSLEW | QKFKGKAILTVDKS | WGQGTTLTVSS |
| | GASVKISCKASG | (SEQ ID NO: 996) | SSTAYMELRSLTSED | (SEQ ID NO: 1031) |
| | (SEQ ID NO: 1418) | | SAVYYC | |
| | | | (SEQ ID NO: 1421) | |
| 1B4 | EVQLVESGGGLVKP | WVRQTPEKRLEW | DSMKGRFTISRDNA | WGQGTTLTVSS |
| | GGSLKLSCEA | (SEQ ID NO: 995) | KNFLYLQMSSLRSE | (SEQ ID NO: 1031) |
| | (SEQ ID NO: 1539) | | DTAMYYC | |
| | | | (SEQ ID NO: 1542) | |
| 6H2 | QVQLQESGPGLVQP | WIRQSPGKGLEW | AAFISRLNISKDNSK | WGQGTLVTVSA |
| | SQSLSIICTV | (SEQ ID NO: 1541) | SQVFFKMNSLQSDD | (SEQ ID NO: 1029) |
| | (SEQ ID NO: 1540) | | TAIYYC | |
| | | | (SEQ ID NO: 1543) | |
| 7B11v1 | EVQLVESGGGLVKP | WVRQTPEKRLEW | DSMKGRFTISRDNA | WGQGTTLTVSS |
| | GGSLKLSCEA | (SEQ ID NO: 995) | KNFLYLQMSSLRSE | (SEQ ID NO: 1031) |
| | (SEQ ID NO: 1539) | | DTAMYYC | |
| | | | (SEQ ID NO: 1542) | |
| 7B11v2 | EVQZQQSGPELVKP | WVKQSLGKSLEW | QKFKGKATLTVDKS | RGTGTTVTV |
| | GASVKISCKA | (SEQ ID NO: 1613) | SSTAYMELRSLTXEE | (SEQ ID NO: 1626) |
| | (SEQ ID NO: 1605) | | SAVYYC | |
| | | | (SEQ ID NO: 1618) | |
| 18D8 | EVQLVESGGGLVKP | WVRQTPEKRLEW | DSMKGRFTISRDNA | WGQGTTLTVSS |
| | GGSLKLSCEA | (SEQ ID NO: 995) | KNFLYLQMSSLRSE | (SEQ ID NO: 1031) |
| | (SEQ ID NO: 1539) | | DTAMYYC | |
| | | | (SEQ ID NO: 1542) | |
| 18E4v1 | EVQLVESGGGLVKP | WVRQTPEKRLEW | DSMKGRFTISRDNA | WGQGTTLTVSS |
| | GGSLKLSCEA | (SEQ ID NO: 995) | KNFLYLQMSSLRSE | (SEQ ID NO: 1031) |
| | (SEQ ID NO: 1539) | | DTAMYYC | |
| | | | (SEQ ID NO: 1542) | |
| 18E4v2 | QVQLQQPGAELVK | WVKEKPGQGLEW | HNFKGKATLTVDKS | WGQGTSVTVSS |
| | PGASVKVSCKA | (SEQ ID NO: 1614) | SSTAYMQLNSLTSE | (SEQ ID NO: 1030) |
| | (SEQ ID NO: 1606) | | DSAVYYC | |
| | | | (SEQ ID NO: 1619) | |
| 29F6v1 | EVQLVESGGGLVKP | WVRQTPEKRLEW | DSMKGRFTISRDNA | WGQGTTLTVSS |
| | GGSLKLSCEA | (SEQ ID NO: 995) | KNFLYLQMSSLRSE | (SEQ ID NO: 1031) |
| | (SEQ ID NO: 1539) | | DTAMYYC | |
| | | | (SEQ ID NO: 1542) | |
| 29F6v2 | QVQLQQSVAELVRP | WVKQRPEQGLEW | PKFQATATITVATSS | WGHGTSVTVSS |
| | GASVKLSCTA | (SEQ ID NO: 1615) | NSAYLQLSSLASEDT | (SEQ ID NO: 1627) |
| | (SEQ ID NO: 1607) | | AIYYC | |
| | | | (SEQ ID NO: 1620) | |
| 40D5v1 | EVQLVESGGGLVKP | WVRQTPEKRLEW | DSMKGRFTISRDNA | WGQGTTLTVSS |
| | GGSLKLSCEA | (SEQ ID NO: 995) | KNFLYLQMSSLRSE | (SEQ ID NO: 1031) |
| | (SEQ ID NO: 1539) | | DTAMYYC | |
| | | | (SEQ ID NO: 1542) | |
| 40D5v2 | QVQLQQSGAELVK | WVKQRPGQGLEW | QKFKGKATLTVDKS | WSQGTLVTVS |
| | PGASVKVSCKA | (SEQ ID NO: 1616) | SSTAYMQILSSLTSE | (SEQ ID NO: 1628) |
| | (SEQ ID NO: 1608) | | DSAVYYC | |
| | | | (SEQ ID NO: 1621) | |
| 43B9 | EVQLVESGGGLVKP | WVRQTPEKRLEW | DSMKGRFTISRDNA | WGQGTTLTVSS |
| | GGSLKLSCEA | (SEQ ID NO: 995) | KNFLYLQMSSLRSE | (SEQ ID NO: 1031) |
| | (SEQ ID NO: 1539) | | DTAMYYC | |
| | | | (SEQ ID NO: 1542) | |
| 44A8 | EVQLVESGGGLVKP | WVRQTPEKRLEW | DSMKGRFTISRDNA | WGQGTTLTVSS |
| | GGSLKLSCEA | (SEQ ID NO: 995) | KNFLYLQMSSLRSE | (SEQ ID NO: 1031) |
| | (SEQ ID NO: 1539) | | DTAMYYC | |
| | | | (SEQ ID NO: 1542) | |
| 44B4v1 | EVQLVESGGGLVKP | WVRQTPEKRLEW | DSMKGRFTISRDNA | WGQGTTLTVSS |
| | GGSLKLSCEA | (SEQ ID NO: 995) | KNFLYLQMSSLRSE | (SEQ ID NO: 1031) |
| | (SEQ ID NO: 1539) | | DTAMYYC | |
| | | | (SEQ ID NO: 1542) | |
| 44B4v2 | XXXXXQSGTELARP | WVKQRPGQGLEW | QKFKDKATLTADKS | WGTGTTVTVSS |
| | GASVKMPCKA | (SEQ ID NO: 1616) | SSTAYMQLSSLTSEE | (SEQ ID NO: 1033) |
| | (SEQ ID NO: 1609) | | SAVYYC | |
| | | | (SEQ ID NO: 1622) | |
| 45D6 | QVQLQQSGRELVKP | WVIQSHGESLEW | QKFKGKATLTVNKS | WGQGTSVTVSS |
| | GASVKMSCMSSG | (SEQ ID NO: 1617) | SSTAYMELRSLTSED | (SEQ ID NO: 1030) |
| | (SEQ ID NO: 1610) | | SAVYYC | |
| | | | (SEQ ID NO: 1623) | |
| 29F7 | QVKLEESGGGLVQP | WVRQSPEKGLEW | ESVKGRFTISRDDSK | WGQGTTLTVSS |
| | GGSMKLSCVASG | (SEQ ID NO: 998) | SSVYLQMNNLRAVD | (SEQ ID NO: 1031) |
| | (SEQ ID NO: 1611) | | TGIYYC | |
| | | | (SEQ ID NO: 1624) | |
| 32G1 | QVQLQQSGPELVKP | WVKQSHGKSLEW | QKFKGKATLTVNKS | WGQGTLVTVSA |
| | GASVQMSCEASG | (SEQ ID NO: 996) | SSTAYIELRSLTSEDS | (SEQ ID NO: 1029) |
| | (SEQ ID NO: 1612) | | AVYHC | |
| | | | (SEQ ID NO: 1625) | |

TABLE D7
Humanized light chain variable region sequences

| | |
|---|---|
| Antibody variant | Humanized sequences |

Antibody 4D11

| | |
|---|---|
| 4D11V3-15 | EIVMTQSPATLSVSPGERATLSCRASENIYSFLAWYQQKPGQAPRLLIY |
| | NSKTFAEGIPARFSGSGSGTEFTLTISSLQSEDFAVYYCQHHYGTPPWTF |
| | GQGTKVEIK (SEQ ID NO:1040) |
| 4D11V1-9 | DIQLTQSPSFLSASVGDRVTITCRASENIYSFLAWYQQKPGKAPKLLI |
| | YNSKTFAEGVPSRFSGSGSGTEFTLTISSLQPEDFATYYCQHHYGTPP |
| | WTFGQGTKVEIK (SEQ ID NO:1041) |
| 4D11V3-11 | EIVLTQSPATLSLSPGERATLSCRASENIYSFLAWYQQKPGQAPRLLIY |
| | NSKTFAEGIPARFSGSGSGTDFTLTISSLEPEDFAVYYCQHHYGTPPW |
| | TFGQGTKVEIK (SEQ ID NO:1042) |
| 4D11V1-5 | DIQMTQSPSTLSASVGDRVTITCRASENIYSFLAWYQQKPGKAPKLLI |
| | YNSKTFAEGVPSRFSGSGSGTEFTLTISSLQPDDFATYYCQHHYGTPP |
| | WTFGQGTKVEIK (SEQ ID NO:1043) |
| 4D11V1-39 | DIQMTQSPSSLSASVGDRVTITCRASENIYSFLAWYQQKPGKAPKLLI |
| | YNSKTFAEGVPSRFSGSGSGTDFTLTISSLQPEDFATYYCQHHYGTPP |
| | WTFGQGTKVEIK (SEQ ID NO:1044) |
| 4D11V1-33 | DIQMTQSPSSLSASVGDRVTITCRASENIYSFLAWYQQKPGKAPKLLI |
| | YNSKTFAEGVPSRFSGSGSGTDFTFTISSLQPEDIATYYCQHHYGTPP |
| | WTFGQGTKVEIK (SEQ ID NO:1045) |

| | |
|---|---|
| 4D11V3-20 | EIVLTQSPGTLSLSPGERATLSCRASENIYSFLAWYQQKPGQAPRLLIY |
| | NSKTFAEGIPDRFSGSGSGTDFTLTISRLEPEDFAVYYCQHHYGTPPW |
| | TFGQGTKVEIK (SEQ ID NO:1046) |
| 4D11V2-28 | DIVMTQSPLSLPVTPGEPASISCRASENIYSFLAWYLQKPGQSPQLLIY |
| | NSKTFAEGVPDRFSGSGSGTDFTLKISRVEAEDVGVYYCQHHYGTPP |
| | WTFGQGTKVEIK (SEQ ID NO:1047) |
| 4D11V2-30 | DVVMTQSPLSLPVTLGQPASISCRASENIYSFLAWFQQRPGQSPRRLI |
| | YNSKTFAEGVPDRFSGSGSGTDFTLKISRVEAEDVGVYYCQHHYGTP |
| | PWTFGQGTKVEIK (SEQ ID NO:1048) |
| 4D11V4-1 | DIVMTQSPDSLAVSLGERATINCRASENIYSFLAWYQQKPGQPPKLLI |
| | YNSKTFAEGVPDRFSGSGSGTDFTLTISSLQAEDVAVYYCQHHYGTP |
| | PWTFGQGTKVEIK (SEQ ID NO:1049) |

Antibody 7C5

| | |
|---|---|
| 7C5V3-15 | EIVMTQSPATLSVSPGERATLSCRASENIYSFLAWYQQKPGQAPRLLI |
| | YNSKTFAEGIPARFSGSGSGTEFTLTISSLQSEDFAVYYCQHHYGTPP |
| | WTFGQGTKVEIK (SEQ ID NO:1040) |
| 7C5V1-9 | DIQLTQSPSFLSASVGDRVTITCRASENIYSFLAWYQQKPGKAPKLLI |
| | YNSKTFAEGVPSRFSGSGSGTEFTLTISSLQPEDFATYYCQHHYGTPP |
| | WTFGQGTKVEIK (SEQ ID NO:1041) |
| 7C5V3-11 | EIVLTQSPATLSLSPGERATLSCRASENIYSFLAWYQQKPGQAPRLLIY |
| | NSKTFAEGIPARFSGSGSGTDFTLTISSLEPEDFAVYYCQHHYGTPPW |
| | TFGQGTKVEIK (SEQ ID NO:1042) |
| 7C5V1-5 | DIQMTQSPSTLSASVGDRVTITCRASENIYSFLAWYQQKPGKAPKLLI |
| | YNSKTFAEGVPSRFSGSGSGTEFTLTISSLQPDDFATYYCQHHYGTPP |
| | WTFGQGTKVEIK (SEQ ID NO:1043) |
| 7C5V1-39 | DIQMTQSPSSLSASVGDRVTITCRASENIYSFLAWYQQKPGKAPKLLI |
| | YNSKTFAEGVPSRFSGSGSGTDFTLTISSLQPEDFATYYCQHHYGTPP |
| | WTFGQGTKVEIK (SEQ ID NO:1044) |
| 7C5V1-33 | DIQMTQSPSSLSASVGDRVTITCRASENIYSFLAWYQQKPGKAPKLLI |
| | YNSKTFAEGVPSRFSGSGSGTDFTFTISSLQPEDIATYYCQHHYGTPP |
| | WTFGQGTKVEIK (SEQ ID NO:1045) |
| 7C5V3-20 | EIVLTQSPGTLSLSPGERATLSCRASENIYSFLAWYQQKPGQAPRLLIY |
| | NSKTFAEGIPDRFSGSGSGTDFTLTISRLEPEDFAVYYCQHHYGTPPW |
| | TFGQGTKVEIK (SEQ ID NO:1046) |
| 7C5V2-28 | DIVMTQSPLSLPVTPGEPASISCRASENIYSFLAWYLQKPGQSPQLLIY |
| | NSKTFAEGVPDRFSGSGSGTDFTLKISRVEAEDVGVYYCQHHYGTPP |
| | WTFGQGTKVEIK (SEQ ID NO:1047) |
| 7C5V2-30 | DVVMTQSPLSLPVTLGQPASISCRASENIYSFLAWFQQRPGQSPRRLI |
| | YNSKTFAEGVPDRFSGSGSGTDFTLKISRVEAEDVGVYYCQHHYGTP |
| | PWTFGQGTKVEIK (SEQ ID NO:1048) |
| 7C5V4-1 | DIVMTQSPDSLAVSLGERATINCRASENIYSFLAWYQQKPGQPPKLLI |
| | YNSKTFAEGVPDRFSGSGSGTDFTLTISSLQAEDVAVYYCQHHYGTP |
| | PWTFGQGTKVEIK (SEQ ID NO:1049) |

Antibody 6G12

| | |
|---|---|
| 6G12V4-1 | DIVMTQSPDSLAVSLGERATTNCKSSQSLLYSSNQKNCLAWYQQKPG |
| | QPPKLLIYWAFTRESGVPDRFSGSGSGTDFTLTISSLQAEDVAVYYCQ |
| | QYYSYPLTFGQGTKVEIK (SEQ ID NO:1051) |
| 6G12V2-30 | DVVMTQSPLSLPVTLGQPASISCKSSQSLLYSSNQKNCLAWFQQRPG |
| | QSPRRLIYWAFTRESGVPDRFSGSGSGTDFTLKISRVEAEDVGVYYC |
| | QQYYSYPLTFGQGTKVEIK (SEQ ID NO:1052) |
| 6G12V2-28 | DIVMTQSPLSLPVTPGEPASISCKSSQSLLYSSNQKNCLAWYLQKPG |
| | QSPQLLIYWAFTRESGVPDRFSGSGSGTDFTLKISRVEAEDVGVYYC |
| | QQYYSYPLTFGQGTKVEIK (SEQ ID NO:1053) |
| 6G12V1-9 | DIQLTQSPSFLSASVGDRVTITCKSSQSLLYSSNQKNCLAWYQQKPG |
| | KAPKLLIYWAFTRESGVPSRFSGSGSGTEFTLTISSLQPEDFATYYCQ |
| | QYYSYPLTFGQGTKVEIK (SEQ ID NO:1054) |
| 6G12V1-5 | DIQMTQSPSTLSASVGDRVTITCKSSQSLLYSSNQKNCLAWYQQKPG |
| | KAPKLLIYWAFTRESGVPSRFSGSGSGTEFTLTISSLQPDDFATYYCQ |
| | QYYSYPLTFGQGTKVEIK (SEQ ID NO:1055) |
| 6G12V3-15 | EIVMTQSPATLSVSPGERATLSCKSSQSLLYSSNQKNCLAWYQQKPG |
| | QAPRLLIYWAFTRESGIPARFSGSGSGTEFTLTISSLQSEDFAVYYCQQ |
| | YYSYPLTFGQGTKVEIK (SEQ ID NO:1056) |
| 6G12V1-33 | DIQMTQSPSSLSASVGDRVTITCKSSQSLLYSSNQKNCLAWYQQKPG |
| | KAPKLLIYWAFTRESGVPSRFSGSGSGTDFTFTISSLQPEDIATYYCQQ |
| | YYSYPLTFGQGTKVEIK (SEQ ID NO:1057) |
| 6G12V1-39 | DIQMTQSPSSLSASVGDRVTITCKSSQSLLYSSNQKNCLAWYQQKPG |
| | KAPKLLIYWAFTRESGVPSRFSGSGSGTDFTLTISSLQPEDFATYYCQQ |
| | YYSYPLTFGQGTKVEIK (SEQ ID NO:1058) |
| 6G12V3-11 | EIVLTQSPATLSLSPGERATLSCKSSQSLLYSSNQKNCLAWYQQKPG |
| | QAPRLLIYWAFTRESGIPARFSGSGSGTDFTLTISSLEPEDFAVYYCQQ |
| | YYSYPLTFGQGTKVEIK (SEQ ID NO:1059) |
| 6G12V3-20 | EIVLTQSPGTLSLSPGERATLSCKSSQSLLYSSNQKNCLAWYQQKPG |
| | QAPRLLIYWAFTRESGIPDRFSGSGSGTDFTLTISRLEPEDFAVYYCQ |
| | QYYSYPLTFGQGTKVEIK (SEQ ID NO:1060) |

Antibody 8F11

| | |
|---|---|
| 8F11V2-30 | DVVMTQSPLSLPVTLGQPASISCKSSQSLLYSNGKTFLSWFQQRPGQS |
| | PRRLIYLVSKLDSGVPDRFSGSGSGTDFTLKISRVEAEDVGVYYCMQ |
| | GTHFPLTFGQGTKVEIK (SEQ ID NO:1062) |
| 8F11V2-28 | DIVMTQSPLSLPVTPGEPASISCKSSQSLLYSNGKTFLSWYLQKPGQS |
| | PQLLIYLVSKLDSGVPDRFSGSGSGTDFTLKISRVEAEDVGVYYCMQ |
| | GTHFPLTFGQGTKVEIK (SEQ ID NO:1063) |
| 8F11V4-1 | DIVMTQSPDSLAVSLGERATINCKSSQSLLYSNGKTFLSWYQQKPGQ |
| | PPKWYLVSKLDSGVPDRFSGSGSGTDFTLTISSLQAEDVAVYYCMQ |
| | GTHFPLTFGQGTKVEIK (SEQ ID NO:1064) |
| 8F11V1-5 | DIQMTQSPSTLSASVGDRVTITCKSSQSLLYSNGKTFLSWYQQKPGK |
| | APKWYLVSKLDSGVPSRFSGSGSGTEFTLTISSLQPDDFATYYCMQ |
| | GTHFPLTFGQGTKVEIK (SEQ ID NO:1065) |
| 8F11V1-9 | DIQLTQSPSFLSASVGDRVTITCKSSQSLLYSNGKTFLSWYQQKPGK |
| | APKWYLVSKLDSGVPSRFSGSGSGTEFTLTISSLQPEDFATYYCMQ |
| | GTHFPLTFGQGTKVEIK (SEQ ID NO:1066) |
| 8F11V1-39 | DIQMTQSPSSLSASVGDRVTITCKSSQSLLYSNGKTFLSWYQQKPGK |
| | APKWYLVSKLDSGVPSRFSGSGSGTDFTLTISSLQPEDFATYYCMQ |
| | GTHFPLTFGQGTKVEIK (SEQ ID NO:1067) |
| 8F11V1-33 | DIQMTQSPSSLSASVGDRVTITCKSSQSLLYSNGKTFLSWYQQKPGK |
| | APKWYLVSKLDSGVPSRFSGSGSGTDFTFTISSLQPEDIATYYCMQG |
| | THFPLTFGQGTKVEIK (SEQ ID NO:1068) |
| 8F11V3-15 | EIVMTQSPATLSVSPGERATLSCKSSQSLLYSNGKTFLSWYQQKPGQ |
| | APRLLIYLVSKLDSGIPARFSGSGSGTEFTLTISSLQSEDFAVYYCMQG |
| | THFPLTFGQGTKVEIK (SEQ ID NO:1069) |
| 8F11V3-11 | EIVLTQSPATLSLSPGERATLSCKSSQSLLYSNGKTFLSWYQQKPGQ |
| | APRLLIYLVSKLDSGIPARFSGSGSGTDFTLTISSLEPEDFAVYYCMQ |
| | GTHFPLTFGQGTKVEIK (SEQ ID NO:1070) |
| 8F11V3-20 | EIVLTQSPGTLSLSPGERATLSCKSSQSLLYSNGKTFLSWYQQKPGQA |
| | PRLLIYLVSKLDSGIPDRFSGSGSGTDFTLTISRLEPEDFAVYYCMQG |
| | THFPLTFGQGTKVEIK (SEQ ID NO:1071) |

Antibody 8E10

| | |
|---|---|
| 8E10V2-30 | DVVMTQSPLSLPVTLGQPASISCKSSQSLLDSDGKTYLNWFQQRPGQ |
| | SPRRLIYLVSKLDSGVPDRFSGSGSGTDFTLKISRVEAEDVGVYYCWQ |
| | GTHFPYTFGQGTKVEIK (SEQ ID NO:1073) |
| 8E10V2-28 | DIVMTQSPLSLPVTPGEPASISCKSSQSLLDSDGKTYLNWYLQKPGQS |
| | PQLLIYLVSKLDSGVPDRFSGSGSGTDFTLKISRVEAEDVGVYYCWQ |
| | GTHFPYTFGQGTKVEIK (SEQ ID NO:1074) |
| 8E10V4-1 | DIVMTQSPDSLAVSLGERATINCKSSQSLLDSDGKTYLNWYQQKPGQ |
| | PPKWYLVSKLDSGVPDRFSGSGSGTDFTLTISSLQAEDVAVYYCWQ |
| | GTHFPYTFGQGTKVEIK (SEQ ID NO:1075) |
| 8E10V1-9 | DIQLTQSPSFLSASVGDRVTITCKSSQSLLDSDGKTYLNWYQQKPGK |
| | APKWYLVSKLDSGVPSRFSGSGSGTEFTLTISSLQPEDFATYYCWQG |
| | THFPYTFGQGTKVEIK (SEQ ID NO:1076) |
| 8E10V1-5 | DIQMTQSPSTLSASVGDRVTITCKSSQSLLDSDGKTYLNWYQQKPGK |
| | APKWYLVSKLDSGVPSRFSGSGSGTEFTLTISSLQPDDFATYYCWQ |
| | GTHFPYTFGQGTKVEIK (SEQ ID NO:1077) |
| 8E10V1-39 | DIQMTQSPSSLSASVGDRVTITCKSSQSLLDSDGKTYLNWYQQKPGK |
| | APKWYLVSKLDSGVPSRFSGSGSGTDFTLTISSLQPEDFATYYCWQ |
| | GTHFPYTFGQGTKVEIK (SEQ ID NO:1078) |
| 8E10V1-33 | DIQMTQSPSSLSASVGDRVTITCKSSQSLLDSDGKTYLNWYQQKPGK |
| | APKWYLVSKLDSGVPSRFSGSGSGTDFTFTISSLQPEDIATYYCWQ |
| | GTHFPYTFGQGTKVEIK (SEQ ID NO:1079) |
| 8E10V3-11 | EIVLTQSPATLSLSPGERATLSCKSSQSLLDSDGKTYLNWYQQKPGQ |
| | APRLLIYLVSKLDSGIPARFSGSGSGTDFTLTISSLEPEDFAVYYCWQG |
| | THFPYTFGQGTKVEIK (SEQ ID NO:1080) |
| 8E10V3-15 | EIVMTQSPATLSVSPGERATLSCKSSQSLLDSDGKTYLNWYQQKPGQ |
| | APRLLIYLVSKLDSGIPARFSGSGSGTEFTLTISSLQSEDFAVYYCWQ |
| | GTHFPYTFGQGTKVEIK (SEQ ID NO:1081) |
| 8E10V3-20 | EIVLTQSPGTLSLSPGERATLSCKSSQSLLDSDGKTYLNWYQQKPGQ |
| | APRLLIYLVSKLDSGIPDRFSGSGSGTDFTLTISRLEPEDFAVYYCWQ |
| | GTHFPYTFGQGTKVEIK (SEQ ID NO:1082) |

Antibody 7E5

| | |
|---|---|
| 7E5V2-30 | DVVMTQSPLSLPVTLGQPASISCKSSQSLLYSNGKTFLSWFQQRPGQS |
| | PRRLIYLVSKLDSGVPDRFSGSGSGTDFTLKISRVEAEDVGVYYCMQ |
| | GTHFPLTFGQGTKVEIK (SEQ ID NO:1062) |
| 7E5V2-28 | DIVMTQSPLSLPVTPGEPASISCKSSQSLLYSNGKTFLSWYLQKPGQS |
| | PQLLIYLVSKLDSGVPDRFSGSGSGTDFTLKISRVEAEDVGVYYCMQ |
| | GTHFPLTFGQGTKVEIK (SEQ ID NO:1063) |
| 7E5V4-1 | DIVMTQSPDSLAVSLGERATINCKSSQSLLYSNGKTFLSWYQQKPGQ |
| | PPKWYLVSKLDSGVPDRFSGSGSGTDFTLTISSLQAEDVAVYYCMQ |
| | GTHFPLTFGQGTKVEIK (SEQ ID NO:1064) |
| 7E5V1-5 | DIQMTQSPSTLSASVGDRVTITCKSSQSLLYSNGKTFLSWYQQKPGK |
| | APKWYLVSKLDSGVPSRFSGSGSGTEFTLTISSLQPDDFATYYCMQG |
| | THFPLTFGQGTKVEIK (SEQ ID NO:1065) |
| 7E5V1-9 | DIQLTQSPSFLSASVGDRVTITCKSSQSLLYSNGKTFLSWYQQKPGK |
| | APKLLIYLVSKLDSGVPSRFSGSGSGTEFTLTISSLQPEDFATYYCMQ |
| | GTHFPLTFGQGTKVEIK (SEQ ID NO:1066) |
| 7E5V1-39 | DIQMTQSPSSLSASVGDRVTITCKSSQSLLYSNGKTFLSWYQQKPGKA |
| | PKWYLVSKLDSGVPSRFSGSGSGTDFTLTISSLQPEDFATYYCMQGT |
| | HFPLTFGQGTKVEIK (SEQ ID NO:1067) |
| 7E5V1-33 | DIQMTQSPSSLSASVGDRVTITCKSSQSLLYSNGKTFLSWYQQKPGKA |
| | PKWYLVSKLDSGVPSRFSGSGSGTDFTFTISSLQPEDIATYYCMQGT |
| | HFPLTFGQGTKVEIK (SEQ ID NO:1068) |
| 7E5V3-15 | EIVMTQSPATLSVSPGERATLSCKSSQSLLYSNGKTFLSWYQQKPGQ |
| | APRLLIYLVSKLDSGIPARFSGSGSGTEFTLTISSLQSEDFAVYYCMQG |
| | THFPLTFGQGTKVEIK (SEQ ID NO:1069) |
| 7E5V3-11 | EIVLTQSPATLSLSPGERATLSCKSSQSLLYSNGKTFLSWYQQKPGQA |
| | PRLLIYLVSKLDSGIPARFSGSGSGTDFTLTISSLEPEDFAVYYCMQGT |
| | HFPLTFGQGTKVEIK (SEQ ID NO:1070) |
| 7E5V3-20 | EIVLTQSPGTLSLSPGERATLSCKSSQSLLYSNGKTFLSWYQQKPGQA |
| | PRLLIYLVSKLDSGIPDRFSGSGSGTDFTLTISRLEPEDFAVYYCMQG |
| | THFPLTFGQGTKVEIK (SEQ ID NO:1071) |

Antibody 7F8

| | |
|---|---|
| 7F8V3-11 | EIVLTQSPATLSLSPGERATLSCSASSSVSYMYWYQQKPGQAPRLLIYL |
| | TSILASGIPARFSGSGSGTDFTLTISSLEPEDFAVYYCQQWSFNPYTFGQ |
| | GTKVEIK (SEQ ID NO:1084) |
| 7F8V1-39 | DIQMTQSPSSLSASVGDRVTITCSASSSVSYMYWYQQKPGKAPKLLI |
| | YLTSILASGVPSRFSGSGSGTDFTLTISSLQPEDFATYYCQQWSFNPYT |
| | FGQGTKVEIK (SEQ ID NO:1085) |
| 7F8V1-5 | DIQMTQSPSTLSASVGDRVTITCSASSSVSYMYWYQQKPGKAPKLLI |
| | YLTSILASGVPSRFSGSGSGTEFTLTISSLQPDDFATYYCQQWSFNPYT |
| | FGQGTKVEIK (SEQ ID NO:1086) |
| 7F8V3-15 | EIVMTQSPATLSVSPGERATLSCSASSSVSYMYWYQQKPGQAPRLLI |
| | YLTSILASGIPARFSGSGSGTEFTLTISSLQSEDFAVYYCQQWSFNPYT |
| | FGQGTKVEIK (SEQ ID NO:1087) |
| 7F8V1-9 | DIQLTQSPSFLSASVGDRVTITCSASSSVSYMYWYQQKPGKAPKWYL |
| | TSILASGVPSRFSGSGSGTEFTLTISSLQPEDFATYYCQQWSFNPYTFGQ |
| | GTKVEIK (SEQ ID NO:1088) |
| 7F8V1-33 | DIQMTQSPSSLSASVGDRVTITCSASSSVSYMYWYQQKPGKAPKLLI |
| | YLTSILASGVPSRFSGSGSGTDFTFTISSLQPEDIATYYCQQWSFNPYT |
| | FGQGTKVEIK (SEQ ID NO:1089) |
| 7F8V3-20 | EIVLTQSPGTLSLSPGERATLSCSASSSVSYMYWYQQKPGQAPRLLIYL |
| | TSILASGIPDRFSGSGSGTDFTLTISRLEPEDFAVYYCQQWSFNPYTFGQ |
| | GTKVEIK (SEQ ID NO:1090) |
| 7F8V2-28 | DIVMTQSPLSLPVTPGEPASISCSASSSVSYMYWYLQKPGQSPQLLIY |
| | LTSILASGVPDRFSGSGSGTDFTLKISRVEAEDVGVYYCQQWSFNPY |
| | TFGQGTKVEIK (SEQ ID NO:1091) |
| 7F8V2-30 | DVVMTQSPLSLPVTLGQPASISCSASSSVSYMYWFQQRPGQSPRRLIY |
| | LTSILASGVPDRFSGSGSGTDFTLKISRVEAEDVGVYYCQQWSFNPYT |
| | FGQGTKVEIK (SEQ ID NO:1092) |
| 7F8V4-1 | DIVMTQSPDSLAVSLGERATINCSASSSVSYMYWYQQKPGQPPKLLI |
| | YLTSILASGVPDRFSGSGSGTDFTLTISSLQAEDVAVYYCQQWSFNPY |
| | TFGQGTKVEIK (SEQ ID NO:1093) |

Antibody 8F8

| | |
|---|---|
| 8F8V2-30 | DVVMTQSPLSLPVTLGQPASISCRSSQSLVHSNGNTYLHWFQQRPGQS |
| | PRRLIYKVSNRFSGVPDRFSGSGSGTDFTLKISRVEAEDVGVYYCSQS |
| | THVPLTFGQGTKVEIK (SEQ ID NO:1095) |
| 8F8V2-28 | DIVMTQSPLSLPVTPGEPASISCRSSQSLVHSNGNTYLHWYLQKPGQ |
| | SPQLLIYKVSNRFSGVPDRFSGSGSGTDFTLKISRVEAEDVGVYYCSQ |
| | STHVPLTFGQGTKVEIK (SEQ ID NO:1096) |
| 8F8V4-1 | DIVMTQSPDSLAVSLGERATINCRSSQSLVHSNGNTYLHWYQQKPGQ |
| | PPKWYKVSNRFSGVPDRFSGSGSGTDFTLTISSLQAEDVAVYYCSQS |
| | THVPLTFGQGTKVEIK (SEQ ID NO:1097) |
| 8F8V3-11 | EIVLTQSPATLSLSPGERATLSCRSSQSLVHSNGNTYLHWYQQKPGQ |
| | APRLLIYKVSNRFSGIPARFSGSGSGTDFTLTISSLEPEDFAVYYCSQST |
| | HVPLTFGQGTKVEIK (SEQ ID NO:1098) |
| 8F8V1-39 | DIQMTQSPSSLSASVGDRVTITCRSSQSLVHSNGNTYLHWYQQKPGK |
| | APKWYKVSNRFSGVPSRFSGSGSGTDFTLTISSLQPEDFATYYCSQS |
| | THVPLTFGQGTKVEIK (SEQ ID NO:1099) |
| 8F8V1-33 | DIQMTQSPSSLSASVGDRVTITCRSSQSLVHSNGNTYLHWYQQKPGK |
| | APKLLIYKVSNRFSGVPSRFSGSGSGTDFTFTISSLQPEDIATYYCSQST |
| | HVPLTFGQGTKVEIK (SEQ ID NO:1100) |
| 8F8V3-15 | EIVMTQSPATLSVSPGERATLSCRSSQSLVHSNGNTYLHWYQQKPGQA |
| | PRLLIYKVSNRFSGIPARFSGSGSGTEFTLTISSLQSEDFAVYYCSQSTHVP |
| | LTFGQGTKVEIK (SEQ ID NO:1101) |
| 8F8V1-5 | DIQMTQSPSTLSASVGDRVTITCRSSQSLVHSNGNTYLHWYQQKPGK |
| | APKWYKVSNRFSGVPSRFSGSGSGTEFTLTISSLQPDDFATYYCSQS |
| | THVPLTFGQGTKVEIK (SEQ ID NO:1102) |
| 8F8V1-9 | DIQLTQSPSFLSASVGDRVTITCRSSQSLVHSNGNTYLHWYQQKPGK |
| | APKWYKVSNRFSGVPSRFSGSGSGTEFTLTISSLQPEDFATYYCSQST |
| | HVPLTFGQGTKVEIK (SEQ ID NO:1103) |
| 8F8V3-20 | EIVLTQSPGTLSLSPGERATLSCRSSQSLVHSNGNTYLHWYQQKPGQA |
| | PRLLIYKVSNRFSGIPDRFSGSGSGTDFTLTISRLEPEDFAVYYCSQSTH |
| | VPLTFGQGTKVEIK (SEQ ID NO:1104) |

Antibody1H7

| | |
|---|---|
| 1H7V1-39 | DIQMTQSPSSLSASVGDRVTITCSASSSVSYMYWYQQKPGKAPKLLI |
| | YLTSILASGVPSRFSGSGSGTDFTLTISSLQPEDFATYYCQQWSFNPY |
| | TFGQGTKVEIK (SEQ ID NO:1085) |
| 1H7V3-11 | EIVLTQSPATLSLSPGERATLSCSASSSVSYMYWYQQKPGQAPRLLIYL |
| | TSILASGIPARFSGSGSGTDFTLTISSLEPEDFAVYYCQQWSFNPYTFGQ |
| | GTKVEIK (SEQ ID NO:1084) |
| 1H7V1-5 | DIQMTQSPSTLSASVGDRVTITCSASSSVSYMYWYQQKPGKAPKLLI |
| | YLTSILASGVPSRFSGSGSGTEFTLTISSLQPDDFATYYCQQWSFNP |
| | YTFGQGTK VEIK (SEQ ID NO:1086) |
| 1H7V1-9 | DIQLTQSPSFLSASVGDRVTITCSASSSVSYMYWYQQKPGKAPKWYL |
| | TSILASGVPSRFSGSGSGTEFTLTISSLQPEDFATYYCQQWSFNPYTFGQ |
| | GTKVEIK (SEQ ID NO:1088) |
| 1H7V3-15 | EIVMTQ SPATLSVSPGERATLSCSASSSVSYMYWYQQKPGQAPRLLI |
| | YLTSILASGIPARFSGSGSGTEFTLTISSLQSEDFAVYYCQQWSFNPYT |
| | FGQGTKVEIK (SEQ ID NO:1087) |
| 1H7V1-33 | DIQMTQSPSSLSASVGDRVTITCSASSSVSYMYWYQQKPGKAPKLLI |
| | YLTSILASGVPSRFSGSGSGTDFTFTISSLQPEDIATYYCQQWSFNPYT |
| | FGQGTKVEIK (SEQ ID NO:1089) |
| 1H7V3-20 | EIVLTQSPGTLSLSPGERATLSCSASSSVSYMYWYQQKPGQAPRLLIYL |
| | TSILASGIPDRFSGSGSGTDFTLTISRLEPEDFAVYYCQQWSFNPYTFGQ |
| | GTKVEIK (SEQ ID NO:1090) |
| 1H7V2-28 | DIVMTQSPLSLPVTPGEPASISCSASSSVSYMYWYLQKPGQSPQLLIY |
| | LTSILASGVPDRFSGSGSGTDFTLKISRVEAEDVGVYYCQQWSFNPY |
| | TFGQGTKVEIK (SEQ ID NO:1091) |
| 1H7V2-30 | DVVMTQSPLSLPVTLGQPASISCSASSSVSYMYWFQQRPGQSPRRLIY |
| | LTSILASGVPDRFSGSGSGTDFTLKISRVEAEDVGVYYCQQWSFNPYT |
| | FGQGTKVEIK (SEQ ID NO:1092) |
| 1H7V4-1 | DIVMTQSPDSLAVSLGERATTNCSASSSVSYMYWYQQKPGQPPKLLI |
| | YLTSILASGVPDRFSGSGSGTDFTLTISSLQAEDVAVYYCQQWSFNPY |
| | TFGQGTKVEIK (SEQ ID NO:1093) |

Antibody 2H8

| | |
|---|---|
| 2H8V3-11 | EIVLTQSPATLSLSPGERATLSCSASSSVSYMYWYQQKPGQAPRLLIYL |
| | TSILASGIPARFSGSGSGTDFTLTISSLEPEDFAVYYCQQWSFNPYTFGQ |
| | GTKVEIK (SEQ ID NO:1084) |
| 2H8V1-39 | DIQMTQSPSSLSASVGDRVTITCSASSSVSYMYWYQQKPGKAPKLLI |
| | YLTSILASGVPSRFSGSGSGTDFTLTISSLQPEDFATYYCQQWSFNPY |
| | TFGQGTKVEIK (SEQ ID NO:1085) |
| 2H8V1-5 | DIQMTQSPSTLSASVGDRVTITCSASSSVSYMYWYQQKPGKAPKLLI |
| | YLTSILASGVPSRFSGSGSGTEFTLTISSLQPDDFATYYCQQWSFNPYT |
| | FGQGTKVEIK (SEQ ID NO:1086) |
| 2H8V3-15 | EIVMTQSPATLSVSPGERATLSCSASSSVSYMYWYQQKPGQAPRLLI |
| | YLTSILASGIPARFSGSGSGTEFTLTISSLQSEDFAVYYCQQWSFNPYT |
| | FGQGTKVEIK (SEQ ID NO:1087) |
| 2H8V1-9 | DIQLTQSPSFLSASVGDRVTITCSASSSVSYMYWYQQKPGKAPKWYL |
| | TSILASGVPSRFSGSGSGTEFTLTISSLQPEDFATYYCQQWSFNPYTFGQ |
| | GTKVEIK (SEQ ID NO:1088) |
| 2H8V1-33 | DIQMTQSPSSLSASVGDRVTITCSASSSVSYMYWYQQKPGKAPKLLI |
| | YLTSILASGVPSRFSGSGSGTDFTFTISSLQPEDIATYYCQQWSFNPYT |
| | FGQGTKVEIK (SEQ ID NO:1089) |
| 2H8V3-20 | EIVLTQSPGTLSLSPGERATLSCSASSSVSYMYWYQQKPGQAPRLLIYL |
| | TSILASGIPDRFSGSGSGTDFTLTISRLEPEDFAVYYCQQWSFNPYTFGQ |
| | GTKVEIK (SEQ ID NO:1090) |
| 2H8V2-28 | DIVMTQSPLSLPVTPGEPASISCSASSSVSYMYWYLQKPGQSPQLLIY |
| | LTSILASGVPDRFSGSGSGTDFTLKISRVEAEDVGVYYCQQWSFNPY |
| | TFGQGTKVEIK (SEQ ID NO:1091) |
| 2H8V2-30 | DVVMTQSPLSLPVTLGQPASISCSASSSVSYMYWFQQRPGQSPRRLIY |
| | LTSILASGVPDRFSGSGSGTDFTLKISRVEAEDVGVYYCQQWSFNPYT |
| | FGQGTKVEIK (SEQ ID NO:1092) |
| 2H8V4-1 | DIVMTQSPDSLAVSLGERATINCSASSSVSYMYWYQQKPGQPPKLLI |
| | YLTSILASGVPDRFSGSGSGTDFTLTISSLQAEDVAVYYCQQWSFNPY |
| | TFGQGTKVEIK (SEQ ID NO:1093) |

Antibody 3A2

| | |
|---|---|
| 3A2 V2-30 | DVVMTQSPLSLPVTLGQPASISCRSSQTIIHSNGNTYLEWFQQRPGQS |
| | PRRLIYKVSNRFSGVPDRFSGSGSGTDFTLKISRVEAEDVGVYYCFQG |
| | SHVPYTFGQGTKVEIK (SEQ ID NO:1108) |
| 3A2 V2-28 | DIVMTQSPLSLPVTPGEPASISCRSSQTIIHSNGNTYLEWYLQKPGQSP |
| | QLLIYKVSNRFSGVPDRFSGSGSGTDFTLKISRVEAEDVGVYYCFQGS |
| | HVPYTFGQGTKVEIK (SEQ ID NO:1109) |
| 3A2 V4-1 | DIVMTQSPDSLAVSLGERATINCRSSQTIIHSNGNTYLEWYQQKPGQ |
| | PPKWYKVSNRFSGVPDRFSGSGSGTDFTLTISSLQAEDVAVYYCFQ |
| | GSHVPYTFGQGTKVEIK (SEQ ID NO:1110) |
| 3A2 V3-11 | EIVLTQSPATLSLSPGERATLSCRSSQTIIHSNGNTYLEWYQQKPGQAP |
| | RLLIYKVSNRFSGIPARFSGSGSGTDFTLTISSLEPEDFAVYYCFQGSH |
| | VPYTFGQGTKVEIK (SEQ ID NO: 1111) |
| 3A2 I-9 | DIQLTQSPSFLSASVGDRVTITCRSSQTIIHSNGNTYLEWYQQKPGKA |
| | PKWYKVSNRFSGVPSRFSGSGSGTEFTLTISSLQPEDFATYYCFQGS |
| | HVPYTFGQGTKVEIK (SEQ ID NO:1112) |
| 3A2 I-33 | DIQMTQSPSSLSASVGDRVTITCRSSQTIIHSNGNTYLEWYQQKPGK |
| | APKWYKVSNRFSGVPSRFSGSGSGTDFTFTISSLQPEDIATYYCFQG |
| | SHVPYTFGQGTKVEIK (SEQ ID NO:1113) |
| 3A2 VI-39 | DIQMTQSPSSLSASVGDRVTITCRSSQTIIHSNGNTYLEWYQQKPGKA |
| | PKWYKVSNRFSGVPSRFSGSGSGTDFTLTISSLQPEDFATYYCFQGS |
| | HVPYTFGQGTKVEIK (SEQ ID NO:1114) |
| 3A2 V3-15 | EIVMTQSPATLSVSPGERATLSCRSSQTIIHSNGNTYLEWYQQKPGQ |
| | APRLLIYKVSNRFSGIPARFSGSGSGTEFTLTISSLQSEDFAVYYCFQG |
| | SHVPYTFGQGTKVEIK (SEQ ID NO:1115) |
| 3A2 VI-5 | DIQMTQSPSTLSASVGDRVTITCRSSQTIIHSNGNTYLEWYQQKPGK |
| | APKWYKVSNRFSGVPSRFSGSGSGTEFTLTISSLQPDDFATYYCFQG |
| | SHVPYTFGQGTKVEIK (SEQ ID NO:1116) |
| 3A2 V3-20 | EIVLTQSPGTLSLSPGERATLSCRSSQTIIHSNGNTYLEWYQQKPGQA |
| | PRLLIYKVSNRFSGIPDRFSGSGSGTDFTLTISRLEPEDFAVYYCFQGS |
| | HVPYTFGQGTKVEIK (SEQ ID NO:1117) |

Antibody 3A7

| | |
|---|---|
| 3A7 V2-30 | DVVMTQSPLSLPVTLGQPASISCKSSQSLLYSNGKTFLSWFQQRPGQS |
| | PRRLIYLVSKLDSGVPDRFSGSGSGTDFTLKISRVEAEDVGVYYCMQ |
| | GTHFPLTFGQGTKVEIK (SEQ ID NO:1062) |
| 3A7 V2-28 | DIVMTQSPLSLPVTPGEPASISCKSSQSLLYSNGKTFLSWYLQKPGQS |
| | PQLLIYLVSKLDSGVPDRFSGSGSGTDFTLKISRVEAEDVGVYYCMQ |
| | GTHFPLTFGQGTKVEIK (SEQ ID NO:1063) |
| 3A7 V4-1 | DIVMTQSPDSLAVSLGERATINCKSSQSLLYSNGKTFLSWYQQKPGQ |
| | PPKWYLVSKLDSGVPDRFSGSGSGTDFTLTISSLQAEDVAVYYCMQ |
| | GTHFPLTFGQGTKVEIK (SEQ ID NO:1064) |
| 3A7 VI-39 | DIQMTQSPSSLSASVGDRVTITCKSSQSLLYSNGKTFLSWYQQKPGK |
| | APKLLIYLVSKLDSGVPSRFSGSGSGTDFTLTISSLQPEDFATYYCMQ |
| | GTHFPLTFGQGTKVEIK (SEQ ID NO:1067) |
| 3A7 I-9 | DIQLTQSPSFLSASVGDRVTITCKSSQSLLYSNGKTFLSWYQQKPGK |
| | APKLLIYLVSKLDSGVPSRFSGSGSGTEFTLTISSLQPEDFATYYCMQ |
| | GTHFPLTFGQGTKVEIK (SEQ ID NO:1066) |
| 3A7 I-5 | DIQMTQSPSTLSASVGDRVTITCKSSQSLLYSNGKTFLSWYQQKPGK |
| | APKLLIYLVSKLDSGVPSRFSGSGSGTEFTLTISSLQPDDFATYYCMQ |
| | GTHFPLTFGQGTKVEIK (SEQ ID NO:1065) |
| 3A7 VI-33 | DIQMTQSPSSLSASVGDRVTITCKSSQSLLYSNGKTFLSWYQQKPGK |
| | APKLLIYLVSKLDSGVPSRFSGSGSGTDFTFTISSLQPEDIATYYCMQG |
| | THFPLTFGQGTKVEIK (SEQ ID NO:1068) |
| 3A7 V3-15 | EIVMTQSPATLSVSPGERATLSCKSSQSLLYSNGKTFLSWYQQKPGQ |
| | APRLLIYLVSKLDSGIPARFSGSGSGTEFTLTISSLQSEDFAVYYCMQG |
| | THFPLTFGQGTKVEIK (SEQ ID NO:1069) |
| 3A7 V3-11 | EIVLTQSPATLSLSPGERATLSCKSSQSLLYSNGKTFLSWYQQKPGQ |
| | APRLLIYLVSKLDSGIPARFSGSGSGTDFTLTISSLEPEDFAVYYCMQ |
| | GTHFPLTFGQGTKVEIK (SEQ ID NO:1070) |
| 3A7 V3-20 | EIVLTQSPGTLSLSPGERATLSCKSSQSLLYSNGKTFLSWYQQKPGQ |
| | APRLLIYLVSKLDSGIPDRFSGSGSGTDFTLTISRLEPEDFAVYYCMQ |
| | GTHFPLTFGQGTKVEIK (SEQ ID NO:1071) |

Antibody 3B10

| | |
|---|---|
| 3B10V4-1 | DIVMTQSPDSLAVSLGERATINCKSSQSLLYSSDQKNYLAWYQQKPG |
| | QPPKLLIYWASTRESGVPDRFSGSGSGTDFTLTISSLQAEDVAVYYCQ |
| | QYYSYPLTFGQGTKVEIK (SEQ ID NO:1120) |
| 3B10V2-28 | DIVMTQSPLSLPVTPGEPASISCKSSQSLLYSSDQKNYLAWYLQKPG |
| | QSPQLLIYWASTRESGVPDRFSGSGSGTDFTLKISRVEAEDVGVYYC |
| | QQYYSYPLTFGQGTKVEIK (SEQ ID NO:1121) |
| 3B10V2-30 | DVVMTQSPLSLPVTLGQPASISCKSSQSLLYSSDQKNYLAWFQQRPG |
| | QSPRRLIYWASTRESGVPDRFSGSGSGTDFTLKISRVEAEDVGVYYC |
| | QQYYSYPLTFGQGTKVEIK (SEQ ID NO:1122) |
| 3B10V1-5 | DIQMTQSPSTLSASVGDRVTITCKSSQSLLYSSDQKNYLAWYQQKPG |
| | KAPKLLIYWASTRESGVPSRFSGSGSGTEFTLTISSLQPDDFATYYCQ |
| | QYYSYPLTFGQGTKVEIK (SEQ ID NO:1123) |
| 3B10V1-9 | DIQLTQSPSFLSASVGDRVTITCKSSQSLLYSSDQKNYLAWYQQKPG |
| | KAPKLLIYWASTRESGVPSRFSGSGSGTEFTLTISSLQPEDFATYYCQQ |
| | YYSYPLTFGQGTKVEIK (SEQ ID NO:1124) |
| 3B10V3-15 | EIVMTQSPATLSVSPGERATLSCKSSQSLLYSSDQKNYLAWYQQKPG |
| | QAPRLLIYWASTRESGIPARFSGSGSGTEFTLTISSLQSEDFAVYYCQQ |
| | YYSYPLTFGQGTKVEIK (SEQ ID NO:1125) |
| 3B10V1-39 | DIQMTQSPSSLSASVGDRVTITCKSSQSLLYSSDQKNYLAWYQQKPG |
| | KAPKLLIYWASTRESGVPSRFSGSGSGTDFTLTISSLQPEDFATYYCQQ |
| | YYSYPLTFGQGTKVEIK (SEQ ID NO:1126) |
| 3B10V3-11 | EIVLTQSPATLSLSPGERATLSCKSSQSLLYSSDQKNYLAWYQQKPG |
| | QAPRLLIYWASTRESGIPARFSGSGSGTDFTLTISSLEPEDFAVYYCQQ |
| | YYSYPLTFGQGTKVEIK (SEQ ID NO:1127) |
| 3B10v1-33 | DIQMTQSPSSLSASVGDRVTITCKSSQSLLYSSDQKNYLAWYQQKPG |
| | KAPKLLIYWASTRESGVPSRFSGSGSGTDFTFTISSLQPEDIATYYCQQ |
| | YYSYPLTFGQGTKVEIK (SEQ ID NO:1128) |
| 3B10V3-20 | EIVLTQSPGTLSLSPGERATLSCKSSQSLLYSSDQKNYLAWYQQKPG |
| | QAPRLLIYWASTRESGIPDRFSGSGSGTDFTLTISRLEPEDFAVYYCQ |
| | QYYSYPLTFGQGTKVEIK (SEQ ID NO:1129) |

Antibody 4F11

| | |
|---|---|
| 4F11V2-30 | DVVMTQSPLSLPVTLGQPASISCRSSQTIIHSNGNTYLEWFQQRPGQS |
| | PRRLIYKVSNRFSGVPDRFSGSGSGTDFTLKISRVEAEDVGVYYCFQ |
| | GSHVPYTFGQGTKVEIK (SEQ ID NO:1108) |
| 4F11V2-28 | DIVMTQSPLSLPVTPGEPASISCRSSQTIIHSNGNTYLEWYLQKPGQSP |
| | QLLIYKVSNRFSGVPDRFSGSGSGTDFTLKISRVEAEDVGVYYCFQG |
| | SHVPYTFGQGTKVEIK (SEQ ID NO:1109) |
| 4F11V4-1 | DIVMTQSPDSLAVSLGERATINCRSSQTIIHSNGNTYLEWYQQKPGQPP |
| | KLLIYKVSNRFSGVPDRFSGSGSGTDFTLTISSLQAEDVAVYYCFQGSHV |
| | PYTFGQGTKVEIK(SEQ ID NO:1110) |
| 4F11V3-11 | EIVLTQSPATLSLSPGERATLSCRSSQTIIHSNGNTYLEWYQQKPGQAP |
| | RLLIYKVSNRFSGIPARFSGSGSGTDFTLTISSLEPEDFAVYYCFQGSHV |
| | PYTFGQGTKVEIK (SEQ ID NO: 1111) |
| 4F11V3-15 | EIVMTQSPATLSVSPGERATLSCRSSQTIIHSNGNTYLEWYQQKPGQ |
| | APRLLIYKVSNRFSGIPARFSGSGSGTEFTLTISSLQSEDFAVYYCFQG |
| | SHVPYTFGQGTKVEIK (SEQ ID NO:1115) |
| 4F11V1-33 | DIQMTQSPSSLSASVGDRVTITCRSSQTIIHSNGNTYLEWYQQKPGK |
| | APKWYKVSNRFSGVPSRFSGSGSGTDFTFTISSLQPEDIATYYCFQG |
| | SHVPYTFGQGTKVEIK (SEQ ID NO:1113) |
| 4F11V1-39 | DIQMTQSPSSLSASVGDRVTITCRSSQTIIHSNGNTYLEWYQQKPGKA |
| | PKWYKVSNRFSGVPSRFSGSGSGTDFTLTISSLQPEDFATYYCFQGS |
| | HVPYTFGQGTKVEIK (SEQ ID NO:1114) |
| 4F11V1-9 | DIQLTQSPSFLSASVGDRVTITCRSSQTIIHSNGNTYLEWYQQKPGKA |
| | PKWYKVSNRFSGVPSRFSGSGSGTEFTLTISSLQPEDFATYYCFQGS |
| | HVPYTFGQGTKVEIK (SEQ ID NO:1112) |
| 4F11V1-5 | DIQMTQSPSTLSASVGDRVTITCRSSQTIIHSNGNTYLEWYQQKPGKA |
| | PKWYKVSNRFSGVPSRFSGSGSGTEFTLTISSLQPDDFATYYCFQGS |
| | HVPYTFGQGTKVEIK (SEQ ID NO:1116) |
| 4F11V3-20 | EIVLTQSPGTLSLSPGERATLSCRSSQTIIHSNGNTYLEWYQQKPGQAP |
| | RLLIYKVSNRFSGIPDRFSGSGSGTDFTLTISRLEPEDFAVYYCFQGSH |
| | VPYTFGQGTKVEIK (SEQ ID NO:1117) |

Antibody 6H6

| | |
|---|---|
| 6H6V4-1 | DIVMTQSPDSLAVSLGERATINCKSSQSVFYSSNQKNYLAWYQQKPG |
| | QPPKLLIYWASTRESGVPDRFSGSGSGTDFTLTISSLQAEDVAVYYCH |
| | QYLSSLTFGQGTKVEIK (SEQ ID NO:1500) |
| 6H6V2-28 | DIVMTQSPLSLPVTPGEPASISCKSSQSVFYSSNQKNYLAWYLQKPGQ |
| | SPQLLIYWASTRESGVPDRFSGSGSGTDFTLKISRVEAEDVGVYYCHQ |
| | YLSSLTFGQGTKVEIK (SEQ ID NO:1501) |
| 6H6V2-30 | DVVMTQSPLSLPVTLGQPASISCKSSQSVFYSSNQKNYLAWFQQRPG |
| | QSPRRLIYWASTRESGVPDRFSGSGSGTDFTLKISRVEAEDVGVYYCH |
| | QYLSSLTFGQGTKVEIK (SEQ ID NO:1502) |
| 6H6V1-5 | DIQMTQSPSTLSASVGDRVTITCKSSQSVFYSSNQKNYLAWYQQKPG |
| | KAPKLLIYWASTRESGVPSRFSGSGSGTEFTLTISSLQPDDFATYYCH |
| | QYLSSLTFGQGTKVEIK (SEQ ID NO:1503) |
| 6H6V1-9 | DIQLTQSPSFLSASVGDRVTITCKSSQSVFYSSNQKNYLAWYQQKPG |
| | KAPKLLIYWASTRESGVPSRFSGSGSGTEFTLTISSLQPEDFATYYCHQ |
| | YLSSLTFGQGTKVEIK (SEQ ID NO:1504) |
| 6H6V3-15 | EIVMTQSPATLSVSPGERATLSCKSSQSVFYSSNQKNYLAWYQQKPG |
| | QAPRLLIYWASTRESGIPARFSGSGSGTEFTLTISSLQSEDFAVYYCHQ |
| | YLSSLTFGQGTKVEIK (SEQ ID NO:1505) |
| 6H6V1-33 | DIQMTQSPSSLSASVGDRVTITCKSSQSVFYSSNQKNYLAWYQQKPG |
| | KAPKLLIYWASTRESGVPSRFSGSGSGTDFTFTISSLQPEDIATYYCHQ |
| | YLSSLTFGQGTKVEIK (SEQ ID NO:1506) |
| 6H6V3-11 | EIVLTQSPATLSLSPGERATLSCKSSQSVFYSSNQKNYLAWYQQKPG |
| | QAPRLLIYWASTRESGIPARFSGSGSGTDFTLTISSLEPEDFAVYYCHQ |
| | YLSSLTFGQGTKVEIK (SEQ ID NO:1507) |
| 6H6V1-39 | DIQMTQSPSSLSASVGDRVTITCKSSQSVFYSSNQKNYLAWYQQKPG |
| | KAPKLLIYWASTRESGVPSRFSGSGSGTDFTLTISSLQPEDFATYYCHQ |
| | YLSSLTFGQGTKVEIK (SEQ ID NO:1508) |
| 6H6V3-20 | EIVLTQSPGTLSLSPGERATLSCKSSQSVFYSSNQKNYLAWYQQKPG |
| | QAPRLLIYWASTRESGIPDRFSGSGSGTDFTLTISRLEPEDFAVYYCHQ |
| | YLSSLTFGQGTKVEIK (SEQ ID NO:1509) |

Antibody 7A9

| | |
|---|---|
| 7A9V1-9 | DIQLTQSPSFLSASVGDRVTITCRASENIYSYLAWYQQKPGKAPKLLI |
| | YKAKTLAEGVPSRFSGSGSGTEFTLTISSLQPEDFATYYCQHHYGTPF |
| | TFGQGTKVEIK (SEQ ID NO:1132) |
| 7A9V3-11 | EIVLTQSPATLSLSPGERATLSCRASENIYSYLAWYQQKPGQAPRLLI |
| | YKAKTLAEGIPARFSGSGSGTDFTLTISSLEPEDFAVYYCQHHYGTPF |
| | TFGQGTKVEIK (SEQ ID NO:1133) |
| 7A9V1-5 | DIQMTQSPSTLSASVGDRVTITCRASENIYSYLAWYQQKPGKAPKLL |
| | IYKAKTLAEGVPSRFSGSGSGTEFTLTISSLQPDDFATYYCQHHYGTP |
| | FTFGQGTKVEIK (SEQ ID NO:1134) |
| 7A9V3-15 | EIVMTQSPATLSVSPGERATLSCRASENIYSYLAWYQQKPGQAPRLLI |
| | YKAKTLAEGIPARFSGSGSGTEFTLTISSLQSEDFAVYYCQHHYGTPF |
| | TFGQGTKVEIK (SEQ ID NO:1135) |
| 7A9V1-39 | DIQMTQSPSSLSASVGDRVTITCRASENIYSYLAWYQQKPGKAPKLLI |
| | YKAKTLAEGVPSRFSGSGSGTDFTLTISSLQPEDFATYYCQHHYGTPF |
| | TFGQGTKVEIK (SEQ ID NO:1136) |
| 7A9V1-33 | DIQMTQSPSSLSASVGDRVTITCRASENIYSYLAWYQQKPGKAPKLLI |
| | YKAKTLAEGVPSRFSGSGSGTDFTFTISSLQPEDIATYYCQHHYGTPFT |
| | FGQGTKVEIK (SEQ ID NO:1137) |
| 7A9V3-20 | EIVLTQSPGTLSLSPGERATLSCRASENIYSYLAWYQQKPGQAPRLLI |
| | YKAKTLAEGIPDRFSGSGSGTDFTLTISRLEPEDFAVYYCQHHYGTPF |
| | TFGQGTKVEIK (SEQ ID NO:1138) |
| 7A9V2-28 | DIVMTQSPLSLPVTPGEPASISCRASENIYSYLAWYLQKPGQSPQLLIY |
| | KAKTLAEGVPDRFSGSGSGTDFTLKISRVEAEDVGVYYCQHHYGTPF |
| | TFGQGTKVEIK (SEQ ID NO:1139) |
| 7A9V4-1 | DIVMTQSPDSLAVSLGERATINCRASENIYSYLAWYQQKPGQPPKLL |
| | IYKAKTLAEGVPDRFSGSGSGTDFTLTISSLQAEDVAVYYCQHHYGT |
| | PFTFGQGTKVEIK (SEQ ID NO:1140) |
| 7A9V2-30 | DVVMTQSPLSLPVTLGQPASISCRASENIYSYLAWFQQRPGQSPRRLI |
| | YKAKTLAEGVPDRFSGSGSGTDFTLKISRVEAEDVGVYYCQHHYGT |
| | PFTFGQGTKVEIK (SEQ ID NO:1141) |

Antibody 8A1

| | |
|---|---|
| 8A1V3-15 | EIVMTQ SPATLSVSPGERATLSCRTSENVYSNLAWYQQKPGQAPRLL |
| | IYAATNLADGIPARFSGSGSGTEFTLTISSLQSEDFAVYYCHHFWGTP |
| | YTFGQGTKVEIK (SEQ ID NO:1143) |
| 8A1V3-11 | EIVLTQ SPATLSLSPGERATLSCRTSENVYSNLAWYQQKPGQAPRLLI |
| | YAATNLADGIPARFSGSGSGTDFTLTISSLEPEDFAVYYCHHFWGTPY |
| | TFGQGTKVEIK (SEQ ID NO:1144) |
| 8A1V1-9 | DIQLTQSPSFLSASVGDRVTITCRTSENVYSNLAWYQQKPGKAPKLLI |
| | YAATNLADGVPSRFSGSGSGTEFTLTISSLQPEDFATYYCHHFWGTPY |
| | TFGQGTKVEIK (SEQ ID NO:1145) |
| 8A1V1-5 | DIQMTQSPSTLSASVGDRVTITCRTSENVYSNLAWYQQKPGKAPKLL |
| | IYAATNLADGVPSRFSGSGSGTEFTLTISSLQPDDFATYYCHHFWGTP |
| | YTFGQGTKVEIK (SEQ ID NO:1146) |
| 8A1V1-39 | DIQMTQSPSSLSASVGDRVTITCRTSENVYSNLAWYQQKPGKAPKLL |
| | IYAATNLADGVPSRFSGSGSGTDFTLTISSLQPEDFATYYCHHFWGTP |
| | YTFGQGTKVEIK (SEQ ID NO:1147) |
| 8A1V1-33 | DIQMTQSPSSLSASVGDRVTITCRTSENVYSNLAWYQQKPGKAPKLL |
| | IYAATNLADGVPSRFSGSGSGTDFTFTISSLQPEDIATYYCHHFWGTP |
| | YTFGQGTKVEIK (SEQ ID NO:1148) |
| 8A1V3-20 | EIVLTQSPGTLSLSPGERATLSCRTSENVYSNLAWYQQKPGQAPRLLI |
| | YAATNLADGIPDRFSGSGSGTDFTLTISRLEPEDFAVYYCHHFWGTPY |
| | TFGQGTKVEIK (SEQ ID NO:1149) |
| 8A1V2-28 | DIVMTQSPLSLPVTPGEPASISCRTSENVYSNLAWYLQKPGQSPQLLIY |
| | AATNLADGVPDRFSGSGSGTDFTLKISRVEAEDVGVYYCHHFWGTP |
| | YTFGQGTKVEIK (SEQ ID NO:1150) |
| 8A1V2-30 | DVVMTQSPLSLPVTLGQPASISCRTSENVYSNLAWFQQRPGQSPRRLI |
| | YAATNLADGVPDRFSGSGSGTDFTLKISRVEAEDVGVYYCHHFWGTP |
| | YTFGQGTKVEIK (SEQ ID NO:1151) |
| 8A1V4-1 | DIVMTQSPDSLAVSLGERATINCRTSENVYSNLAWYQQKPGQPPKLL |
| | IYAATNLADGVPDRFSGSGSGTDFTLTISSLQAEDVAVYYCHHFWGT |
| | PYTFGQGTKVEIK (SEQ ID NO:1152) |

Antibody 9F5

| | |
|---|---|
| 9F5V2-30 | DVVMTQSPLSLPVTLGQPASISCRSSQSLVHSNGYTYLHWFQQRPGQ |
| | SPRRLIYKVSNRFSGVPDRFSGSGSGTDFTLKISRVEAEDVGVYYCSQ |
| | STRVPYTFGQGTKVEIK (SEQ ID NO:1154) |
| 9F5V2-28 | DIVMTQSPLSLPVTPGEPASISCRSSQSLVHSNGYTYLHWYLQKPGQ |
| | SPQLLIYKVSNRFSGVPDRFSGSGSGTDFTLKISRVEAEDVGVYYCSQ |
| | STRVPYTFGQGTKVEIK (SEQ ID NO:1155) |
| 9F5V4-1 | DIVMTQSPDSLAVSLGERATINCRSSQSLVHSNGYTYLHWYQQKPGQ |
| | PPKWYKVSNRFSGVPDRFSGSGSGTDFTLTISSLQAEDVAVYYCSQS |
| | TRVPYTFGQGTKVEIK (SEQ ID NO:1156) |
| 9F5V3-11 | EIVLTQSPATLSLSPGERATLSCRSSQSLVHSNGYTYLHWYQQKPGQ |
| | APRLLIYKVSNRFSGIPARFSGSGSGTDFTLTISSLEPEDFAVYYCSQST |
| | RVPYTFGQGTKVEIK (SEQ ID NO:1157) |
| 9F5V1-33 | DIQMTQSPSSLSASVGDRVTITCRSSQSLVHSNGYTYLHWYQQKPGK |
| | APKLLIYKVSNRFSGVPSRFSGSGSGTDFTFTISSLQPEDIATYYCSQST |
| | RVPYTFGQGTKVEIK (SEQ ID NO:1158) |
| 9F5V3-15 | EIVMTQSPATLSVSPGERATLSCRSSQSLVHSNGYTYLHWYQQKPGQ |
| | APRLLIYKVSNRFSGIPARFSGSGSGTEFTLTISSLQSEDFAVYYCSQST |
| | RVPYTFGQGTKVEIK (SEQ ID NO:1159) |
| 9F5V1-5 | DIQMTQSPSTLSASVGDRVTITCRSSQSLVHSNGYTYLHWYQQKPG |
| | KAPKWYKVSNRFSGVPSRFSGSGSGTEFTLTISSLQPDDFATYYCSQ |
| | STRVPYTFGQGTKVEIK (SEQ ID NO:1160) |
| 9F5V1-39 | DIQMTQSPSSLSASVGDRVTITCRSSQSLVHSNGYTYLHWYQQKPGK |
| | APKWYKVSNRFSGVPSRFSGSGSGTDFTLTISSLQPEDFATYYCSQS |
| | TRVPYTFGQGTKVEIK (SEQ ID NO:1161) |
| 9F5V1-9 | DIQLTQSPSFLSASVGDRVTITCRSSQSLVHSNGYTYLHWYQQKPGKA |
| | PKWYKVSNRFSGVPSRFSGSGSGTEFTLTISSLQPEDFATYYCSQSTR |
| | VPYTFGQGTKVEIK (SEQ ID NO:1162) |
| 9F5V3-20 | EIVLTQSPGTLSLSPGERATLSCRSSQSLVHSNGYTYLHWYQQKPGQ |
| | APRLLIYKVSNRFSGIPDRFSGSGSGTDFTLTISRLEPEDFAVYYCSQST |
| | RVPYTFGQGTKVEIK (SEQ ID NO:1163) |
| 9F5-L1 | DIVMTQTPLSLSVTPGQPASISCRSSQSLVHSNGYTYLHWYLQKPGQ |
| | SPQLLIYKVSNRFSGVPDRFSGSGSGTDFTLKISRVEAEDVGVYYCSQ |
| | STRVPYTFGQGTKLEIK (SEQ ID NO:1663) |
| 9F5-L2 | DVVMTQTPLSLSVTPGQPASISCRSSQSLVHSNGYTYLHWYLQKPGQ |
| | SPQLLIYKVSNRFSGVPDRFSGSGSGTDFTLKISRVEAEDVGVYYCSQ |
| | STRVPYTFGQGTKLEIK (SEQ ID NO:1664) |

Antibody 9G1

| | |
|---|---|
| 9G1V2-30 | DVVMTQSPLSLPVTLGQPASISCRFSQSLVHSNGNTYLHWFQQRPGQ |
| | SPRRLIYKVSNRFSGVPDRFSGSGSGTDFTLKISRVEAEDVGVYYCSQ |
| | STRVPPTFGQGTKVEIK (SEQ ID NO:1165) |
| 9G1V2-28 | DIVMTQSPLSLPVTPGEPASISCRFSQSLVHSNGNTYLHWYLQKPGQSPQ |
| | LLIYKVSNRFSGVPDRFSGSGSGTDFTLKISRVEAEDVGVYYCSQSTRVP |
| | PTFGQGTKVEIK (SEQ ID NO:1166) |
| 9G1V4-1 | DIVMTQSPDSLAVSLGERATINCRFSQSLVHSNGNTYLHWYQQKPGQ |
| | PPKWYKVSNRFSGVPDRFSGSGSGTDFTLTISSLQAEDVAVYYCSQS |
| | TRVPPTFGQGTKVEIK (SEQ ID NO:1167) |
| 9G1V3 -11 | EIVLTQSPATLSLSPGERATLSCRFSQSLVHSNGNTYLHWYQQKPGQ |
| | APRLLIYKVSNRFSGIPARFSGSGSGTDFTLTISSLEPEDFAVYYCSQST |
| | RVPPTFGQGTKVEIK (SEQ ID NO:1168) |
| 9G1V3-15 | EIVMTQSPATLSVSPGERATLSCRFSQSLVHSNGNTYLHWYQQKPGQ |
| | APRLLIYKVSNRFSGIPARFSGSGSGTEFTLTISSLQSEDFAVYYCSQS |
| | TRVPPTFGQGTKVEIK (SEQ ID NO:1169) |
| 9G1V1-9 | DIQLTQSPSFLSASVGDRVTITCRFSQSLVHSNGNTYLHWYQQKPGK |
| | APKWYKVSNRFSGVPSRFSGSGSGTEFTLTISSLQPEDFATYYCSQST |
| | RVPPTFGQGTKVEIK (SEQ ID NO:1170) |
| 9G1V1-5 | DIQMTQSPSTLSASVGDRVTITCRFSQSLVHSNGNTYLHWYQQKPGK |
| | APKWYKVSNRFSGVPSRFSGSGSGTEFTLTISSLQPDDFATYYCSQST |
| | RVPPTFGQGTKVEIK (SEQ ID NO:1171) |
| 9G1V1-39 | DIQMTQSPSSLSASVGDRVTITCRFSQSLVHSNGNTYLHWYQQKPGKAP |
| | KLLIYKVSNRFSGVPSRFSGSGSGTDFTLTISSLQPEDFATYYCSQSTRVPP |
| | TFGQGTKVEIK (SEQ ID NO:1172) |
| 9G1V1-33 | DIQMTQSPSSLSASVGDRVTITCRFSQSLVHSNGNTYLHWYQQKPGK |
| | APKWYKVSNRFSGVPSRFSGSGSGTDFTFTISSLQPEDIATYYCSQST |
| | RVPPTFGQGTKVEIK (SEQ ID NO:1173) |
| 9G1V3 -20 | EIVLTQSPGTLSLSPGERATLSCRFSQSLVHSNGNTYLHWYQQKPGQ |
| | APRLLIYKVSNRFSGIPDRFSGSGSGTDFTLTISRLEPEDFAVYYCSQS |
| | TRVPPTFGQGTKVEIK (SEQ ID NO:1174) |

Antibody 9G3

| | |
|---|---|
| 9G3V1-33 | DIQMTQSPSSLSASVGDRVTITCKASSNVNYMSWYQQKPGKAPKLLIY |
| | FTSNLPSGVPSRFSGSGSGTDFTFTISSLQPEDIATYYCSGEVTQFTFGQG |
| | TKVEIK (SEQ ID NO:1176) |
| 9G3V1-9 | DIQLTQSPSFLSASVGDRVTITCKASSNVNYMSWYQQKPGKAPKLLIY |
| | FTSNLPSGVPSRFSGSGSGTEFTLTISSLQPEDFATYYCSGEVTQFTFGQ |
| | GTKVEIK (SEQ ID NO:1177) |
| 9G3V1-39 | DIQMTQSPSSLSASVGDRVTITCKASSNVNYMSWYQQKPGKAPKLLIY |
| | FTSNLPSGVPSRFSGSGSGTDFTLTISSLQPEDFATYYCSGEVTQFTFGQ |
| | GTKVEIK (SEQ ID NO:1178) |
| 9G3V3-11 | EIVLTQSPATLSLSPGERATLSCKASSNVNYMSWYQQKPGQAPRLLIYF |
| | TSNLPSGIPARFSGSGSGTDFTLTISSLEPEDFAVYYCSGEVTQFTFGQG |
| | TKVEIK (SEQ ID NO:1641) |
| 9G3V1-5 | DIQMTQSPSTLSASVGDRVTITCKASSNVNYMSWYQQKPGKAPKLLIYF |
| | TSNLPSGVPSRFSGSGSGTEFTLTISSLQPDDFATYYCSGEVTQFTFGQGT |
| | KVEIK (SEQ ID NO:1179) |
| 9G3V3-15 | EIVMTQSPATLSVSPGERATLSCKASSNVNYMSWYQQKPGQAPRLLIY |
| | FTSNLPSGIPARFSGSGSGTEFTLTISSLQSEDFAVYYCSGEVTQFTFGQG |
| | TKVEIK (SEQ ID NO:1180) |
| 9G3V3-20 | EIVLTQSPGTLSLSPGERATLSCKASSNVNYMSWYQQKPGQAPRLLIYF |
| | TSNLPSGIPDRFSGSGSGTDFTLTISRLEPEDFAVYYCSGEVTQFTFGQG |
| | TKVEIK (SEQ ID NO:1181) |
| 9G3V2-28 | DIVMTQSPLSLPVTPGEPASISCKASSNVNYMSWYLQKPGQSPQLLIY |
| | FTSNLPSGVPDRFSGSGSGTDFTLKISRVEAEDVGVYYCSGEVTQFTF |
| | GQGTKVEIK (SEQ ID NO:1182) |
| 9G3V2-30 | DVVMTQSPLSLPVTLGQPASISCKASSNVNYMSWFQQRPGQSPRRLIYF |
| | TSNLPSGVPDRFSGSGSGTDFTLKISRVEAEDVGVYYCSGEVTQFTFGQ |
| | GTKVEIK (SEQ ID NO:1183) |
| 9G3V4-1 | DIVMTQSPDSLAVSLGERATTNCKASSNVNYMSWYQQKPGQPPKLLI |
| | YFTSNLPSGVPDRFSGSGSGTDFTLTISSLQAEDVAVYYCSGEVTQFTF |
| | GQGTKVEIK (SEQ ID NO:1184) |

Antibody10A9

| | |
|---|---|
| 10A9V2-30 | DVVMTQSPLSLPVTLGQPASISCRSSQTIIHSNGNTYLEWFQQRPGQSPRR |
| | LIYKVSNRFCGVPDRFSGSGSGTDFTLKISRVEAEDVGVYYCFQGSHVPY |
| | TFGQGTKVEIK (SEQ ID NO:1186) |
| 10A9V2-28 | DIVMTQSPLSLPVTPGEPASISCRSSQTIIHSNGNTYLEWYLQKPGQSP |
| | QLLIYKVSNRFCGVPDRFSGSGSGTDFTLKISRVEAEDVGVYYCFQG |
| | SHVPYTFGQGTKVEIK (SEQ ID NO:1187) |
| 10A9V4-1 | DIVMTQSPDSLAVSLGERATINCRSSQTIIHSNGNTYLEWYQQKPGQP |
| | PKWYKVSNRFCGVPDRFSGSGSGTDFTLTISSLQAEDVAVYYCFQG |
| | SHVPYTFGQGTKVEIK (SEQ ID NO:1188) |
| 10A9V3-11 | EIVLTQSPATLSLSPGERATLSCRSSQTIIHSNGNTYLEWYQQKPGQAP |
| | RLLIYKVSNRFCGIPARFSGSGSGTDFTLTISSLEPEDFAVYYCFQGSH |
| | VPYTFGQGTKVEIK (SEQ ID NO:1189) |
| 10A9V3-15 | EIVMTQSPATLSVSPGERATLSCRSSQTIIHSNGNTYLEWYQQKPGQ |
| | APRLLIYKVSNRFCGIPARFSGSGSGTEFTLTISSLQSEDFAVYYCFQG |
| | SHVPYTFGQGTKVEIK (SEQ ID NO:1190) |
| 10A9V1-33 | DIQMTQSPSSLSASVGDRVTITCRSSQTIIHSNGNTYLEWYQQKPG |
| | KAPKWYKVSNRFCGVPSRFSGSGSGTDFTFTISSLQPEDIATYYCF |
| | QGSHVPYTFGQGTKVEIK (SEQ ID NO:1191) |
| 10A9V3-20 | EIVLTQSPGTLSLSPGERATLSCRSSQTIIHSNGNTYLEWYQQKPGQAP |
| | RLLIYKVSNRFCGIPDRFSGSGSGTDFTLTISRLEPEDFAVYYCFQGSH |
| | VPYTFGQGTKVEIK (SEQ ID NO:1192) |
| 10A9V1-9 | DIQLTQSPSFLSASVGDRVTITCRSSQTIIHSNGNTYLEWYQQKPGKA |
| | PKWYKVSNRFCGVPSRFSGSGSGTEFTLTISSLQPEDFATYYCFQGS |
| | HVPYTFGQGTKVEIK (SEQ ID NO:1193) |
| 10A9V1-5 | DIQMTQSPSTLSASVGDRVTITCRSSQTIIHSNGNTYLEWYQQKPGKA |
| | PKWYKVSNRFCGVPSRFSGSGSGTEFTLTISSLQPDDFATYYCFQGS |
| | HVPYTFGQGTKVEIK (SEQ ID NO:1194) |
| 10A9V1-39 | DIQMTQSPSSLSASVGDRVTITCRSSQTIIHSNGNTYLEWYQQKPGKA |
| | PKWYKVSNRFCGVPSRFSGSGSGTDFTLTISSLQPEDFATYYCFQGS |
| | HVPYTFGQGTKVEIK (SEQ ID NO:1195) |

Antibody11A8

| | |
|---|---|
| 11A8V4-1 | DIVMTQSPDSLAVSLGERATINCKSSQSLLNSGNQKKYLTWYQQKPG |
| | QPPKLLIYWASTRESGVPDRFSGSGSGTDFTLTISSLQAEDVAVYYCQ |
| | NDYGFPLTFGQGTKVEIK (SEQ ID NO:1197) |
| 11A8V2-30 | DVVMTQSPLSLPVTLGQPASISCKSSQSLLNSGNQKKYLTWFQQRPG |
| | QSPRRLIYWASTRESGVPDRFSGSGSGTDFTLKISRVEAEDVGVYYCQ |
| | NDYGFPLTFGQGTKVEIK (SEQ ID NO:1198) |
| 11A8V2-28 | DIVMTQSPLSLPVTPGEPASISCKSSQSLLNSGNQKKYLTWYLQKPG |
| | QSPQLLIYWASTRESGVPDRFSGSGSGTDFTLKISRVEAEDVGVYYC |
| | QNDYGFPLTFGQGTKVEIK (SEQ ID NO:1199) |
| 11A8V1-33 | DIQMTQSPSSLSASVGDRVTITCKSSQSLLNSGNQKKYLTWYQQKPG |
| | KAPKLLIYWASTRESGVPSRFSGSGSGTDFTFTISSLQPEDIATYYCQN |
| | DYGFPLTFGQGTKVEIK (SEQ ID NO:1200) |
| 11A8V3-11 | EIVLTQSPATLSLSPGERATLSCKSSQSLLNSGNQKKYLTWYQQKPG |
| | QAPRLLIYWASTRESGIPARFSGSGSGTDFTLTISSLEPEDFAVYYCQN |
| | DYGFPLTFGQGTKVEIK (SEQ ID NO:1201) |
| 11A8V3-15 | EIVMTQSPATLSVSPGERATLSCKSSQSLLNSGNQKKYLTWYQQKPG |
| | QAPRLLIYWASTRESGIPARFSGSGSGTEFTLTISSLQSEDFAVYYCQN |
| | DYGFPLTFGQGTKVEIK (SEQ ID NO:1202) |
| 11A8V1-5 | DIQMTQSPSTLSASVGDRVTITCKSSQSLLNSGNQKKYLTWYQQKPG |
| | KAPKLLIYWASTRESGVPSRFSGSGSGTEFTLTISSLQPDDFATYYCQ |
| | NDYGFPLTFGQGTKVEIK (SEQ ID NO:1203) |
| 11A8V3-20 | EIVLTQSPGTLSLSPGERATLSCKSSQSLLNSGNQKKYLTWYQQKPG |
| | QAPRLLIYWASTRESGIPDRFSGSGSGTDFTLTISRLEPEDFAVYYCQN |
| | DYGFPLTFGQGTKVEIK (SEQ ID NO:1204) |
| 11A8V1-9 | DIQLTQSPSFLSASVGDRVTITCKSSQSLLNSGNQKKYLTWYQQKPG |
| | KAPKLLIYWASTRESGVPSRFSGSGSGTEFTLTISSLQPEDFATYYCQ |
| | NDYGFPLTFGQGTKVEIK (SEQ ID NO:1205) |
| 11A8V1-39 | DIQMTQSPSSLSASVGDRVTITCKSSQSLLNSGNQKKYLTWYQQKPG |
| | KAPKLLIYWASTRESGVPSRFSGSGSGTDFTLTISSLQPEDFATYYCQ |
| | NDYGFPLTFGQGTKVEIK (SEQ ID NO:1206) |

Antibody12D9

| | |
|---|---|
| 12D9V4-1 | DIVMTQSPDSLAVSLGERATINCKSSQSLLYSGNQKNFLAWYQQKPG |
| | QPPKLLIYWASTRESGVPDRFSGSGSGTDFTLTISSLQAEDVAVYYCQ |
| | QYYSYPFTFGQGTKVEIK (SEQ ID NO:1208) |
| 12D9V2-28 | DIVMTQSPLSLPVTPGEPASISCKSSQSLLYSGNQKNFLAWYLQKPGQ |
| | SPQLLIYWASTRESGVPDRFSGSGSGTDFTLKISRVEAEDVGVYYCQQ |
| | YYSYPFTFGQGTKVEIK (SEQ ID NO:1209) |
| 12D9V2-30 | DVVMTQSPLSLPVTLGQPASISCKSSQSLLYSGNQKNFLAWFQQRPG |
| | QSPRRLIYWASTRESGVPDRFSGSGSGTDFTLKISRVEAEDVGVYYCQ |
| | QYYSYPFTFGQGTKVEIK (SEQ ID NO:1210) |
| 12D 9V1-9 | DIQLTQSPSFLSASVGDRVTITCKSSQSLLYSGNQKNFLAWYQQKPG |
| | KAPKLLIYWASTRESGVPSRFSGSGSGTEFTLTISSLQPEDFATYYCQQ |
| | YYSYPFTFGQGTKVEIK (SEQ ID NO:1211) |
| 12D9V1-5 | DIQMTQSPSTLSASVGDRVTITCKSSQSLLYSGNQKNFLAWYQQKPG |
| | KAPKLLIYWASTRESGVPSRFSGSGSGTEFTLTISSLQPDDFATYYCQ |
| | QYYSYPFTFGQGTKVEIK (SEQ ID NO:1212) |
| 12D9V3-15 | EIVMTQSPATLSVSPGERATLSCKSSQSLLYSGNQKNFLAWYQQKPG |
| | QAPRLLIYWASTRESGIPARFSGSGSGTEFTLTISSLQSEDFAVYYCQQ |
| | YYSYPFTFGQGTKVEIK (SEQ ID NO:1213) |
| 12D9V1-33 | DIQMTQSPSSLSASVGDRVTITCKSSQSLLYSGNQKNFLAWYQQKPG |
| | KAPKLLIYWASTRESGVPSRFSGSGSGTDFTFTISSLQPEDIATYYCQQ |
| | YYSYPFTFGQGTKVEIK (SEQ ID NO:1214) |
| 12D9V3-11 | EIVLTQSPATLSLSPGERATLSCKSSQSLLYSGNQKNFLAWYQQKPG |
| | QAPRLLIYWASTRESGIPARFSGSGSGTDFTLTISSLEPEDFAVYYCQQ |
| | YYSYPFTFGQGTKVEIK (SEQ ID NO:1215) |
| 12D9V1-39 | DIQMTQSPSSLSASVGDRVTITCKSSQSLLYSGNQKNFLAWYQQKPG |
| | KAPKLLIYWASTRESGVPSRFSGSGSGTDFTLTISSLQPEDFATYYCQ |
| | QYYSYPFTFGQGTKVEIK (SEQ ID NO:1216) |
| 12D9V3-20 | EIVLTQSPGTLSLSPGERATLSCKSSQSLLYSGNQKNFLAWYQQKPG |
| | QAPRLLIYWASTRESGIPDRFSGSGSGTDFTLTISRLEPEDFAVYYCQQ |
| | YYSYPFTFGQGTKVEIK (SEQ ID NO:1217) |

Antibody12F9

| | |
|---|---|
| 12F9V4-1 | DIVMTQSPDSLAVSLGERATINCKSSQSLLYSSDQKNYLAWYQQKPG |
| | QPPKLLIYWASTRESGVPDRFSGSGSGTDFTLTISSLQAEDVAVYYCQ |
| | QYYSYPLTFGQGTKVEIK (SEQ ID NO:1120) |
| 12F9V2-28 | DIVMTQSPLSLPVTPGEPASISCKSSQSLLYSSDQKNYLAWYLQKPG |
| | QSPQLLIYWASTRESGVPDRFSGSGSGTDFTLKISRVEAEDVGVYYC |
| | QQYYSYPLTFGQGTKVEIK (SEQ ID NO:1121) |
| 12F9V2-30 | DVVMTQSPLSLPVTLGQPASISCKSSQSLLYSSDQKNYLAWFQQRPG |
| | QSPRRLIYWASTRESGVPDRFSGSGSGTDFTLKISRVEAEDVGVYYC |
| | QQYYSYPLTFGQGTKVEIK (SEQ ID NO:1122) |
| 12F9V3-15 | EIVMTQSPATLSVSPGERATLSCKSSQSLLYSSDQKNYLAWYQQKPG |
| | QAPRLLIYWASTRESGIPARFSGSGSGTEFTLTISSLQSEDFAVYYCQQ |
| | YYSYPLTFGQGTKVEIK (SEQ ID NO:1125) |
| 12F9V1-5 | DIQMTQSPSTLSASVGDRVTITCKSSQSLLYSSDQKNYLAWYQQKPG |
| | KAPKLLIYWASTRESGVPSRFSGSGSGTEFTLTISSLQPDDFATYYCQ |
| | QYYSYPLTFGQGTKVEIK (SEQ ID NO:1123) |
| 12F9V1-9 | DIQLTQSPSFLSASVGDRVTITCKSSQSLLYSSDQKNYLAWYQQKPG |
| | KAPKLLIYWASTRESGVPSRFSGSGSGTEFTLTISSLQPEDFATYYCQ |
| | QYYSYPLTFGQGTKVEIK (SEQ ID NO:1124) |
| 12F9V1-33 | DIQMTQSPSSLSASVGDRVTITCKSSQSLLYSSDQKNYLAWYQQKPG |
| | KAPKLLIYWASTRESGVPSRFSGSGSGTDFTFTISSLQPEDIATYYCQQ |
| | YYSYPLTFGQGTKVEIK (SEQ ID NO:1128) |
| 12F9V3-11 | EIVLTQSPATLSLSPGERATLSCKSSQSLLYSSDQKNYLAWYQQKPG |
| | QAPRLLIYWASTRESGIPARFSGSGSGTDFTLTISSLEPEDFAVYYCQQ |
| | YYSYPLTFGQGTKVEIK (SEQ ID NO:1127) |
| 12F9V1-39 | DIQMTQSPSSLSASVGDRVTITCKSSQSLLYSSDQKNYLAWYQQKPG |
| | KAPKLLIYWASTRESGVPSRFSGSGSGTDFTLTISSLQPEDFATYYCQQ |
| | YYSYPLTFGQGTKVEIK (SEQ ID NO:1126) |
| 12F9V3-20 | EIVLTQSPGTLSLSPGERATLSCKSSQSLLYSSDQKNYLAWYQQKPG |
| | QAPRLLIYWASTRESGIPDRFSGSGSGTDFTLTISRLEPEDFAVYYCQQ |
| | YYSYPLTFGQGTKVEIK (SEQ ID NO:1129) |

Antibodyl0C1

| | |
|---|---|
| 10C1V4-1 | DIVMTQSPDSLAVSLGERATINCKSSQSVFYSSNQKNYLAWYQQKPG |
| | QPPKLLIYWASTRESGVPDRFSGSGSGTDFTLTISSLQAEDVAVYYCH |
| | QYLSSLTFGQGTKVEIK (SEQ ID NO:1423) |
| 10C1V2-30 | DVVMTQSPLSLPVTLGQPASISCKSSQSVFYSSNQKNYLAWFQQRPG |
| | QSPRRLIYWASTRESGVPDRFSGSGSGTDFTLKISRVEAEDVGVYYCH |
| | QYLSSLTFGQGTKVEIK (SEQ ID NO:1424) |
| 10C1V2-28 | DIVMTQSPLSLPVTPGEPASISCKSSQSVFYSSNQKNYLAWYLQKPGQ |
| | SPQLLIYWASTRESGVPDRFSGSGSGTDFTLKISRVEAEDVGVYYCH |
| | QYLSSLTFGQGTKVEIK (SEQ ID NO:1425) |
| 10C1V1-5 | DIQMTQSPSTLSASVGDRVTITCKSSQSVFYSSNQKNYLAWYQQKPG |
| | KAPKLLIYWASTRESGVPSRFSGSGSGTEFTLTISSLQPDDFATYYCHQ |
| | YLSSLTFGQGTKVEIK (SEQ ID NO:1426) |
| 10C1V3-15 | EIVMTQSPATLSVSPGERATLSCKSSQSVFYSSNQKNYLAWYQQKPG |
| | QAPRLLIYWASTRESGIPARFSGSGSGTEFTLTISSLQSEDFAVYYCHQ |
| | YLSSLTFGQGTKVEIK (SEQ ID NO:1427) |
| 10C1V1-9 | DIQLTQSPSFLSASVGDRVTITCKSSQSVFYSSNQKNYLAWYQQKPG |
| | KAPKLLIYWASTRESGVPSRFSGSGSGTEFTLTISSLQPEDFATYYCH |
| | QYLSSLTFGQGTKVEIK (SEQ ID NO:1428) |
| 10C1V3-11 | EIVLTQSPATLSLSPGERATLSCKSSQSVFYSSNQKNYLAWYQQKPG |
| | QAPRLLIYWASTRESGIPARFSGSGSGTDFTLTISSLEPEDFAVYYCHQ |
| | YLSSLTFGQGTKVEIK (SEQ ID NO:1429) |
| 10C1V1-39 | DIQMTQSPSSLSASVGDRVTITCKSSQSVFYSSNQKNYLAWYQQKPG |
| | KAPKLLIYWASTRESGVPSRFSGSGSGTDFTLTISSLQPEDFATYYCHQ |
| | YLSSLTFGQGTKVEIK (SEQ ID NO:1430) |
| 10C1V1-33 | DIQMTQSPSSLSASVGDRVTITCKSSQSVFYSSNQKNYLAWYQQKPG |
| | KAPKLLIYWASTRESGVPSRFSGSGSGTDFTFTISSLQPEDIATYYCHQ |
| | YLSSLTFGQGTKVEIK (SEQ ID NO:1431) |
| 10C1V3-20 | EIVLTQSPGTLSLSPGERATLCKSSQSVFYSSNQKNYLAWYQQKPG |
| | QAPRLLIYWASTRESGIPDRFSGSGSGTDFTLTISRLEPEDFAVYYCHQ |
| | YLSSLTFGQGTKVEIK (SEQ ID NO:1432) |

Antibody 7E9

| | |
|---|---|
| 7E9V4-1 | DIVMTQSPDSLAVSLGERATINCKSSQSLLYSSNQKNCLAWYQQKPG |
| | QPPKLLIYWASTRESGVPDRFSGSGSGTDFTLTISSLQAEDVAVYYCQ |
| | QYYSYPLTFGQGTKVEIK (SEQ ID NO:1434) |
| 7E9V2-28 | DIVMTQSPLSLPVTPGEPASISCKSSQSLLYSSNQKNCLAWYLQKPG |
| | QSPQLLIYWASTRESGVPDRFSGSGSGTDFTLKISRVEAEDVGVYYC |
| | QQYYSYPLTFGQGTKVEIK (SEQ ID NO:1435) |
| 7E9V2-30 | DVVMTQSPLSLPVTLGQPASISCKSSQSLLYSSNQKNCLAWFQQRPG |
| | QSPRRLIYWASTRESGVPDRFSGSGSGTDFTLKISRVEAEDVGVYYC |
| | QQYYSYPLTFGQGTKVEIK (SEQ ID NO:1436) |
| 7E9V1-9 | DIQLTQSPSFLSASVGDRVTITCKSSQSLLYSSNQKNCLAWYQQKPG |
| | KAPKLLIYWASTRESGVPSRFSGSGSGTEFTLTISSLQPEDFATYYCQ |
| | QYYSYPLTFGQGTKVEIK (SEQ ID NO:1437) |
| 7E9V3-15 | EIVMTQSPATLSVSPGERATLSCKSSQSLLYSSNQKNCLAWYQQKPG |
| | QAPRLLIYWASTRESGIPARFSGSGSGTEFTLTISSLQSEDFAVYYCQQ |
| | YYSYPLTFGQGTKVEIK (SEQ ID NO:1438) |
| 7E9V1-5 | DIQMTQSPSTLSASVGDRVTITCKSSQSLLYSSNQKNCLAWYQQKPG |
| | KAPKLLIYWASTRESGVPSRFSGSGSGTEFTLTISSLQPDDFATYYCQ |
| | QYYSYPLTFGQGTKVEIK (SEQ ID NO:1439) |
| 7E9V1-33 | DIQMTQSPSSLSASVGDRVTITCKSSQSLLYSSNQKNCLAWYQQKPG |
| | KAPKLLIYWASTRESGVPSRFSGSGSGTDFTFTISSLQPEDIATYYCQQ |
| | YYSYPLTFGQGTKVEIK (SEQ ID NO:1440) |
| 7E9V1-39 | DIQMTQSPSSLSASVGDRVTITCKSSQSLLYSSNQKNCLAWYQQKPG |
| | KAPKLLIYWASTRESGVPSRFSGSGSGTDFTLTISSLQPEDFATYYCQQ |
| | YYSYPLTFGQGTKVEIK (SEQ ID NO:1441) |
| 7E9V3-11 | EIVLTQSPATLSLSPGERATLSCKSSQSLLYSSNQKNCLAWYQQKPG |
| | QAPRLLIYWASTRESGIPARFSGSGSGTDFTLTISSLEPEDFAVYYCQQ |
| | YYSYPLTFGQGTKVEIK (SEQ ID NO:1442) |
| 7E9V3-20 | EIVLTQSPGTLSLSPGERATLSCKSSQSLLYSSNQKNCLAWYQQKPG |
| | QAPRLLIYWASTRESGIPDRFSGSGSGTDFTLTISRLEPEDFAVYYCQQ |
| | YYSYPLTFGQGTKVEIK (SEQ ID NO:1443) |

Antibody 8C3

| | |
|---|---|
| 8C3V2-30 | DVVMTQSPLSLPVTLGQPASISCRSSQSLVHSNGNTYLHWFQQRPGQ |
| | SPRRLIYKVSNRFSGVPDRFSGSGSGTDFTLKISRVEAEDVGVYYCSQ |
| | STHVPPTFGQGTKVEIK (SEQ ID NO:1445) |
| 8C3V2-28 | DIVMTQSPLSLPVTPGEPASISCRSSQSLVHSNGNTYLHWYLQKPGQSP |
| | QLLIYKVSNRFSGVPDRFSGSGSGTDFTLKISRVEAEDVGVYYCSQSTHV |
| | PPTFGQGTKVEIK (SEQ ID NO:1446) |
| 8C3V4-1 | DIVMTQSPDSLAVSLGERATINCRSSQSLVHSNGNTYLHWYQQKPGQ |
| | PPKWYKVSNRFSGVPDRFSGSGSGTDFTLTISSLQAEDVAVYYCSQS |
| | THVPPTFGQGTKVEIK (SEQ ID NO:1447) |
| 8C3V3-11 | EIVLTQSPATLSLSPGERATLSCRSSQSLVHSNGNTYLHWYQQKPGQ |
| | APRLLIYKVSNRFSGIPARFSGSGSGTDFTLTISSLEPEDFAVYYCSQST |
| | HVPPTFGQGTKVEIK (SEQ ID NO:1448) |
| 8C3V1-33 | DIQMTQSPSSLSASVGDRVTITCRSSQSLVHSNGNTYLHWYQQKPGK |
| | APKLLIYKVSNRFSGVPSRFSGSGSGTDFTFTISSLQPEDIATYYCSQS |
| | THVPPTFGQGTKVEIK (SEQ ID NO:1449) |
| 8C3V1-5 | DIQMTQSPSTLSASVGDRVTITCRSSQSLVHSNGNTYLHWYQQKPGK |
| | APKLLIYKVSNRFSGVPSRFSGSGSGTEFTLTISSLQPDDFATYYCSQST |
| | HVPPTFGQGTKVEIK (SEQ ID NO:1450) |
| 8C3V1-39 | DIQMTQSPSSLSASVGDRVTITCRSSQSLVHSNGNTYLHWYQQKPGK |
| | APKWYKVSNRFSGVPSRFSGSGSGTDFTLTISSLQPEDFATYYCSQS |
| | THVPPTFGQGTKVEIK (SEQ ID NO:1451) |
| 8C3V1-9 | DIQLTQSPSFLSASVGDRVTITCRSSQSLVHSNGNTYLHWYQQKPGK |
| | APKLLIYKVSNRFSGVPSRFSGSGSGTEFTLTISSLQPEDFATYYCSQS |
| | THVPPTFGQGTKVEIK (SEQ ID NO:1452) |
| 8C3V3-15 | EIVMTQSPATLSVSPGERATLSCRSSQSLVHSNGNTYLHWYQQKPGQ |
| | APRLLIYKVSNRFSGIPARFSGSGSGTEFTLTISSLQSEDFAVYYCSQST |
| | HVPPTFGQGTKVEIK (SEQ ID NO:1453) |
| 8C3V3-20 | EIVLTQSPGTLSLSPGERATLSCRSSQSLVHSNGNTYLHWYQQKPGQ |
| | APRLLIYKVSNRFSGIPDRFSGSGSGTDFTLTISRLEPEDFAVYYCSQST |
| | HVPPTFGQGTKVEIK (SEQ ID NO:1454) |

TABLE D8
Humanized heavy chain variable region sequences

| | |
|---|---|
| Antibody variant | Humanized sequences |

Antibody 4D11

| | |
|---|---|
| 4D11V4-59 | QVQLQESGPGLVKPSETLSLTCTVSGFTLSSYAMSWIRQPPGKGLEW |
| | VASISRGGSTYYPPSLKSRVTISVDTSKNQFSLKLSSVTAADTAVYYC |
| | TRGYGYYRTPFANWGQGTLVTVSS (SEQ ID NO: 1220) |
| 4D11V3-23 | EVQLLESGGGLVQPGGSLRLSCAASGFTLSSYAMSWVRQAPGKGLE |
| | WVASISRGGSTYYPDSVKGRFTISRDNSKNTLYLQMNSLRAEDTAVY |
| | YCTRGYGYYRTPFANWGQGTLVTVSS (SEQ ID NO: 1221) |
| 4D11V3-7 | EVQLVESGGGLVQPGGSLRLSCAASGFTLSSYAMSWVRQAPGKGLE |
| | WVASISRGGSTYYPDSVKGRFTISRDNAKNSLYLQMNSLRAEDTAVY |
| | YCTRGYGYYRTPFANWGQGTLVTVSS (SEQ ID NO: 1222) |
| 4D11V3-48 | EVQLVESGGGLVQPGGSLRLSCAASGFTLSSYAMSWVRQAPGKGLE |
| | WVASISRGGSTYYPDSVKGRFTISRDNAKNSLYLQMNSLRAEDTAVY |
| | YCTRGYGYYRTPFANWGQGTLVTVSS (SEQ ID NO: 1222) |
| 4D11V3-30 | QVQLVESGGGVVQPGRSLRLSCAASGFTLSSYAMSWVRQAPGKGLE |
| | WVASISRGGSTYYPDSVKGRFTISRDNSKNTLYLQMNSLRAEDTAVY |
| | YCTRGYGYYRTPFANWGQGTLVTVSS (SEQ ID NO: 1223) |
| 4D11V1-69 | QVQLVQSGAEVKKPGSSVKVSCKASGFTLSSYAMSWVRQAPGQGLE |
| | WVASISRGGSTYYPQKFQGRVTITADESTSTAYMELSSLRSEDTAVYY |
| | CTRGYGYYRTPFANWGQGTLVTVSS (SEQ ID NO:1224) |
| 4D11V1-46 | QVQLVQSGAEVKKPGASVKVSCKASGFTLSSYAMSWVRQAPGQGLE |
| | WVASISRGGSTYYPQKFQGRVTMTRDTSTSTVYMELSSLRSEDTAVY |
| | YCTRGYGYYRTPFANWGQGTLVTVSS (SEQ ID NO:1225) |
| 4D11V5-51 | EVQLVQSGAEVKKPGESLKISCKGSGFTLSSYAMSWVRQMPGKGLE |
| | WVASISRGGSTYYPPSFQGQVTISADKSISTAYLQWSSLKASDTAMYY |
| | CTRGYGYYRTPFANWGQGTLVTVSS (SEQ ID NO: 1226) |
| 4D11V4-39 | QLQLQESGPGLVKPSETLSLTCTVSGFTLSSYAMSWIRQPPGKGLEW |
| | VASISRGGSTYYPPSLKSRVTISVDTSKNQFSLKLSSVTAADTAVYYC |
| | TRGYGYYRTPFANWGQGTLVTVSS (SEQ ID NO: 1227) |
| 4D11V4-30-4 | QVQLQESGPGLVKPSQTLSLTCTVSGFTLSSYAMSWIRQPPGKGLEW |
| | VASISRGGSTYYPPSLKSRVTISVDTSKNQFSLKLSSVTAADTAVYYC |
| | TRGYGYYRTPFANWGQGTLVTVSS (SEQ ID NO:1228) |

Antibody 7C5

| | |
|---|---|
| 7C5V4-59 | QVQLQESGPGLVKPSETLSLTCTVSGFTLSSYAMSWIRQPPGKGLEW |
| | VASISRGGSTYYPPSLKSRVTISVDTSKNQFSLKLSSVTAADTAVYYC |
| | TRGYGYYRTPFANWGQGTLVTVSS (SEQ ID NO:1220) |
| 7C5V3-23 | EVQLLESGGGLVQPGGSLRLSCAASGFTLSSYAMSWVRQAPGKGLE |
| | WVASISRGGSTYYPDSVKGRFTISRDNSKNTLYLQMNSLRAEDTAVY |
| | YCTRGYGYYRTPFANWGQGTLVTVSS (SEQ ID NO:1221) |
| 7C5V3-7 | EVQLVESGGGLVQPGGSLRLSCAASGFTLSSYAMSWVRQAPGKGLE |
| | WVASISRGGSTYYPDSVKGRFTISRDNAKNSLYLQMNSLRAEDTAV |
| | YYCTRGYGYYRTPFANWGQGTLVTVSS (SEQ ID NO:1222) |
| 7C5V3-48 | EVQLVESGGGLVQPGGSLRLSCAASGFTLSSYAMSWVRQAPGKGLE |
| | WVASISRGGSTYYPDSVKGRFTISRDNAKNSLYLQMNSLRAEDTAV |
| | YYCTRGYGYYRTPFANWGQGTLVTVSS (SEQ ID NO:1222) |
| 7C5V3-30 | QVQLVESGGGVVQPGRSLRLSCAASGFTLSSYAMSWVRQAPGKGLE |
| | WVASISRGGSTYYPDSVKGRFTISRDNSKNTLYLQMNSLRAEDTAVY |
| | YCTRGYGYYRTPFANWGQGTLVTVSS (SEQ ID NO:1223) |
| 7C5V1-69 | QVQLVQSGAEVKKPGSSVKVSCKASGFTLSSYAMSWVRQAPGQGLE |
| | WVASISRGGSTYYPQKFQGRVTITADESTSTAYMELSSLRSEDTAVY |
| | YCTRGYGYYRTPFANWGQGTLVTVSS (SEQ ID NO:1224) |
| 7C5V1-46 | QVQLVQSGAEVKKPGASVKVSCKASGFTLSSYAMSWVRQAPGQGL |
| | EWVASISRGGSTYYPQKFQGRVTMTRDTSTSTVYMELSSLRSEDTAV |
| | YYCTRGYGYYRTPFANWGQGTLVTVSS (SEQ ID NO:1225) |
| 7C5V5-51 | EVQLVQSGAEVKKPGESLKISCKGSGFTLSSYAMSWVRQMPGKGLE |
| | WVASISRGGSTYYPPSFQGQVTISADKSISTAYLQWSSLKASDTAMY |
| | YCTRGYGYYRTPFANWGQGTLVTVSS (SEQ ID NO:1226) |
| 7C5V4-39 | QLQLQESGPGLVKPSETLSLTCTVSGFTLSSYAMSWIRQPPGKGLEW |
| | VASISRGGSTYYPPSLKSRVTISVDTSKNQFSLKLSSVTAADTAVYYC |
| | TRGYGYYRTPFANWGQGTLVTVSS (SEQ ID NO:1227) |
| 7C5V4-30-4 | QVQLQESGPGLVKPSQTLSLTCTVSGFTLSSYAMSWIRQPPGKGLEW |
| | VASISRGGSTYYPPSLKSRVTISVDTSKNQFSLKLSSVTAADTAVYYC |
| | TRGYGYYRTPFANWGQGTLVTVSS (SEQ ID NO:1228) |

Antibody 6G12

| | |
|---|---|
| 6G12V1-46 | QVQLVQSGAEVKKPGASVKVSCKASGYTFTEYTMHWVRQAPGQGL |
| | EWIGGINPNNGGTSYSQKFQGRVTMTRDTSTSTVYMELSSLRSEDTA |
| | VYYCARGGSHYYAMDYWGQGTLVTVSS (SEQ ID NO:1230) |
| 6G12V5-51 | EVQLVQSGAEVKKPGESLKISCKGSGYTFTEYTMHWVRQMPGKGLE |
| | WIGGINPNNGGTSYSPSFQGQVTISADKSISTAYLQWSSLKASDTAMY |
| | YCARGGSHYYAMDYWGQGTLVTVSS (SEQ ID NO:1231) |
| 6G12V1-69 | QVQLVQSGAEVKKPGSSVKVSCKASGYTFTEYTMEIWVRQAPGQGL |
| | EWIGGINPNNGGTSYSQKFQGRVTITADESTSTAYMELSSLRSEDTAV |
| | YYCARGGSHYYAMDYWGQGTLVTVSS (SEQ ID NO:1232) |
| 6G12V3-23 | EVQLLESGGGLVQPGGSLRLSCAASGYTFTEYTMHWVRQAPGKGLE |
| | WIGGINPNNGGTSYSDSVKGRFTISRDNSKNTLYLQMNSLRAEDTAV |
| | YYCARGGSHYYAMDYWGQGTLVTVSS (SEQ ID NO:1233) |
| 6G12V3-30 | QVQLVESGGGVVQPGRSLRLSCAASGYTFTEYTMEIWVRQAPGKGL |
| | EWIGGINPNNGGTSYSDSVKGRFTISRDNSKNTLYLQMNSLRAEDTA |
| | VYYCARGGSHYYAMDYWGQGTLVTVSS (SEQ ID NO:1234) |
| 6G12V3-48 | EVQLVESGGGLVQPGGSLRLSCAASGYTFTEYTMHWVRQAPGKGLE |
| | WIGGINPNNGGTSYSDSVKGRFTISRDNAKNSLYLQMNSLRAEDTAV |
| | YYCARGGSHYYAMDYWGQGTLVTVSS (SEQ ID NO:1235) |
| 6G12V3-7 | EVQLVESGGGLVQPGGSLRLSCAASGYTFTEYTMHWVRQAPGKGLE |
| | WIGGINPNNGGTSYSDSVKGRFTISRDNAKNSLYLQMNSLRAEDTAV |
| | YYCARGGSHYYAMDYWGQGTLVTVSS (SEQ ID NO:1235) |
| 6G12V4-59 | QVQLQESGPGLVKPSETLSLTCTVSGYTFTEYTMHWIRQPPGKGLEW |
| | IGGINPNNGGTSYSPSLKSRVTISVDTSKNQFSLKLSSVTAADTAVYY |
| | CARGGSHYYAMDYWGQGTLVTVSS (SEQ ID NO:1236) |
| 6G12V3-15 | EVQLVESGGGLVKPGGSLRLSCAASGYTFTEYTMHWVRQAPGKGLEWI |
| | GGINPNNGGTSYSAPVKGRFTISRDDSKNTLYLQMNSLKTEDTAVYYCA |
| | RGGSHYYAMDYWGQGTLVTVSS (SEQ ID NO:1237) |
| 6G12V4-39 | QLQLQESGPGLVKPSETLSLTCTVSGYTFTEYTMHWIRQPPGKGLEWIGG |
| | INPNNGGTSYSPSLKSRVTISVDTSKNQFSLKLSSVTAADTAVYYCARGG |
| | SHYYAMDYWGQGTLVTVSS (SEQ ID NO:1238) |

Antibody 8E10

| | |
|---|---|
| 8E10V1-46 | QVQLVQSGAEVKKPGASVKVSCKASGYTFTDYEMHWVRQAPGQGLEWI |
| | GVIDPETGGTAYNQKFQGRVTMTRDTSTSTVYMELSSLRSEDTAVYYCTS |
| | PDYYGSSYPLYYAMDYWGQGTLVTVSS (SEQ ID NO:1240) |
| 8E10V5-51 | EVQLVQSGAEVKKPGESLKISCKGSGYTFTDYEMEIWVRQMPGKGLEWIG |
| | VIDPETGGTAYNPSFQGQVTISADKSISTAYLQWSSLKASDTAMYYCTSPD |
| | YYGSSYPLYYAMDYWGQGTLVTVSS (SEQ ID NO:1241) |
| 8E10V3-30 | QVQLVESGGGVVQPGRSLRLSCAASGYTFTDYEMEIWVRQAPGKGLEWIG |
| | VIDPETGGTAYNDSVKGRFTISRDNSKNTLYLQMNSLRAEDTAVYYCTSP |
| | DYYGSSYPLYYAMDYWGQGTLVTVSS (SEQ ID NO:1242) |
| 8E10V3-23 | EVQLLESGGGLVQPGGSLRLSCAASGYTFTDYEMEIWVRQAPGKGLEWIG |
| | VIDPETGGTAYNDSVKGRFTISRDNSKNTLYLQMNSLRAEDTAVYYCTSP |
| | DYYGSSYPLYYAMDYWGQGTLVTVSS (SEQ ID NO:1243) |
| 8E10V1-69 | QVQLVQSGAEVKKPGSSVKVSCKASGYTFTDYEMEIWVRQAPGQGLEWI |
| | GVIDPETGGTAYNQKFQGRVTITADESTSTAYMELSSLRSEDTAVYYCTSP |
| | DYYGSSYPLYYAMDYWGQGTLVTVSS (SEQ ID NO:1244) |
| 8E10V3-48 | EVQLVESGGGLVQPGGSLRLSCAASGYTFTDYENIHWVRQAPGKGLEWIG |
| | VIDPETGGTAYNDSVKGRFTISRDNAKNSLYLQMNSLRAEDTAVYYCTSP |
| | DYYGSSYPLYYAMDYWGQGTLVTVSS (SEQ ID NO:1245) |
| 8E10V3-7 | EVQLVESGGGLVQPGGSLRLSCAASGYTFTDYENIHWVRQAPGKGLEWIG |
| | VIDPETGGTAYNDSVKGRFTISRDNAKNSLYLQMNSLRAEDTAVYYCTSP |
| | DYYGSSYPLYYAMDYWGQGTLVTVSS (SEQ ID NO:1245) |
| 8E10V4-59 | QVQLQESGPGLVKPSETLSLTCTVSGYTFTDYENIHWIRQPPGKGLEWIGVI |
| | DPETGGTAYNPSLKSRVTISVDTSKNQFSLKLSSVTAADTAVYYCTSPDYY |
| | GSSYPLYYAMDYWGQGTLVTVSS (SEQ ID NO:1246) |
| 8E10V3-15 | EVQLVESGGGLVKPGGSLRLSCAASGYTFTDYENIHWVRQAPGKGLEWIG |
| | VIDPETGGTAYNAPVKGRFTISRDDSKNTLYLQMNSLKTEDTAVYYCTSP |
| | DYYGSSYPLYYAMDYWGQGTLVTVSS (SEQ ID NO:1247) |
| 8E10V4-39 | QLQLQESGPGLVKPSETLSLTCTVSGYTFTDYENIHWIRQPPGKGLEWIGVI |
| | DPETGGTAYNPSLKSRVTISVDTSKNQFSLKLSSVTAADTAVYYCTSPDYY |
| | GSSYPLYYAMDYWGQGTLVTVSS (SEQ ID NO: 1248) |

Antibody 7E5

| | |
|---|---|
| 7E5V3-15 | EVQLVESGGGLVKPGGSLRLSCAASGFTFSDAWMGWVRQAPGKGLEWV |
| | AEIRDKVKNHATYYAAPVKGRFTISRDDSKNTLYLQMNSLKTEDTAVYY |
| | CRLGVFDYWGQGTLVTVSS (SEQ ID NO:1250) |
| 7E5V3-7 | EVQLVESGGGLVQPGGSLRLSCAASGFTFSDAWMGWVRQAPGKGLEWV |
| | AEIRDKVKNHATYYADSVKGRFTISRDNAKNSLYLQMNSLRAEDTAVYY |
| | CRLGVFDYWGQGTLVTVSS (SEQ ID NO:1251) |
| 7E5V3-23 | EVQLLESGGGLVQPGGSLRLSCAASGFTFSDAWMGWVRQAPGKGLEWV |
| | AEIRDKVKNHATYYADSVKGRFTISRDNSKNTLYLQMNSLRAEDTAVYY |
| | CRLGVFDYWGQGTLVTVSS (SEQ ID NO:1252) |
| 7E5V3-48 | EVQLVESGGGLVQPGGSLRLSCAASGFTFSDAWMGWVRQAPGKGLEWV |
| | AEIRDKVKNHATYYADSVKGRFTISRDNAKNSLYLQMNSLRAEDTAVYY |
| | CRLGVFDYWGQGTLVTVSS (SEQ ID NO:1251) |
| 7E5V3-30 | QVQLVESGGGVVQPGRSLRLSCAASGFTFSDAWMGWVRQAPGKGLEWV |
| | AEIRDKVKNHATYYADSVKGRFTISRDNSKNTLYLQMNSLRAEDTAVYY |
| | CRLGVFDYWGQGTLVTVSS (SEQ ID NO:1253) |
| 7E5V1-69 | QVQLVQSGAEVKKPGSSVKVSCKASGFTFSDAWMGWVRQAPGQGLEWV |
| | AEIRDKVKNHATYYAQKFQGRVTITADESTSTAYMELSSLRSEDTAVYYC |
| | RLGVFDYWGQGTLVTVSS (SEQ ID NO:1254) |
| 7E5V1-46 | QVQLVQSGAEVKKPGASVKVSCKASGFTFSDAWMGWVRQAPGQGLEW |
| | VAEIRDKVKNHATYYAQKFQGRVTMTRDTSTSTVYMELSSLRSEDTAVY |
| | YCRLGVFDYWGQGTLVTVSS (SEQ ID NO:1255) |
| 7E5V5-51 | EVQLVQSGAEVKKPGESLKISCKGSGFTFSDAWMGWVRQMPGKGLEWV |
| | AEIRDKVKNHATYYAPSFQGQVTISADKSISTAYLQWSSLKASDTAMYYC |
| | RLGVFDYWGQGTLVTVSS (SEQ ID NO:1256) |
| 7E5V4-59 | QVQLQESGPGLVKPSETLSLTCTVSGFTFSDAWMGWIRQPPGKGLEWVAE |
| | IRDKVKNHATYYAPSLKSRVTISVDTSKNQFSLKLSSVTAADTAVYYCRL |
| | GVFDYWGQGTLVTVSS (SEQ ID NO:1257) |
| 7E5V4-39 | QLQLQESGPGLVKPSETLSLTCTVSGFTFSDAWMGWIRQPPGKGLEWVAE |
| | IRDKVKNHATYYAPSLKSRVTISVDTSKNQFSLKLSSVTAADTAVYYCRL |
| | GVFDYWGQGTLVTVSS (SEQ ID NO:1258) |

Antibody 7F8

| | |
|---|---|
| 7F8V3-15 | EVQLVESGGGLVKPGGSLRLSCAASGFSFNTYAMNWVRQAPGKGLEWIA |
| | RIRSKSNNYATYYAAPVKGRFTISRDDSKNTLYLQMNSLKTEDTAVYYCV |
| | RHGDGNLWYIDVWGQGTLVTVSS (SEQ ID NO:1260) |
| 7F8V3-48 | EVQLVESGGGLVQPGGSLRLSCAASGFSFNTYAMNWVRQAPGKGLEWIA |
| | RIRSKSNNYATYYADSVKGRFTISRDNAKNSLYLQMNSLRAEDTAVYYCV |
| | RHGDGNLWYIDVWGQGTLVTVSS (SEQ ID NO:1261) |
| 7F8V3-23 | EVQLLESGGGLVQPGGSLRLSCAASGFSFNTYAMNWVRQAPGKGLEWIA |
| | RIRSKSNNYATYYADSVKGRFTISRDNSKNTLYLQMNSLRAEDTAVYYCV |
| | RHGDGNLWYIDVWGQGTLVTVSS (SEQ ID NO:1262) |
| 7F8V3-7 | EVQLVESGGGLVQPGGSLRLSCAASGFSFNTYAMNWVRQAPGKGLEWIA |
| | RIRSKSNNYATYYADSVKGRFTISRDNAKNSLYLQMNSLRAEDTAVYYCV |
| | RHGDGNLWYIDVWGQGTLVTVSS (SEQ ID NO:1261) |
| 7F8V3-30 | QVQLVESGGGVVQPGRSLRLSCAASGFSFNTYAMNWVRQAPGKGLEWIA |
| | RIRSKSNNYATYYADSVKGRFTISRDNSKNTLYLQMNSLRAEDTAVYYCV |
| | RHGDGNLWYIDVWGQGTLVTVSS (SEQ ID NO:1263) |
| 7F8V1-69 | QVQLVQSGAEVKKPGSSVKVSCKASGFSFNTYAMNWVRQAPGQGLEWI |
| | ARIRSKSNNYATYYAQKFQGRVTITADESTSTAYMELSSLRSEDTAVYYC |
| | VRHGDGNLWYIDVWGQGTLVTVSS (SEQ ID NO:1264) |
| 7F8V5-51 | EVQLVQSGAEVKKPGESLKISCKGSGFSFNTYAMNWVRQMPGKGLEWIA |
| | RIRSKSNNYATYYAPSFQGQVTISADKSISTAYLQWSSLKASDTAMYYCV |
| | RHGDGNLWYIDVWGQGTLVTVSS (SEQ ID NO:1265) |
| 7F8V1-46 | QVQLVQSGAEVKKPGASVKVSCKASGFSFNTYAMNWVRQAPGQGLEWI |
| | ARIRSKSNNYATYYAQKFQGRVTMTRDTSTSTVYMELSSLRSEDTAVYYC |
| | VRHGDGNLWYIDVWGQGTLVTVSS (SEQ ID NO:1266) |
| 7F8V4-59 | QVQLQESGPGLVKPSETLSLTCTVSGFSFNTYAMNWIRQPPGKGLEWIARI |
| | RSKSNNYATYYAPSLKSRVTISVDTSKNQFSLKLSSVTAADTAVYYCVRH |
| | GDGNLWYIDVWGQGTLVTVSS (SEQ ID NO:1267) |
| 7F8V4-30-4 | QVQLQESGPGLVKPSQTLSLTCTVSGFSFNTYAMNWIRQPPGKGLEWIARI |
| | RSKSNNYATYYAPSLKSRVTISVDTSKNQFSLKLSSVTAADTAVYYCVRH |
| | GDGNLWYIDVWGQGTLVTVSS (SEQ ID NO:1268) |

Antibody 8F8

| | |
|---|---|
| 8F8V1-46 | QVQLVQSGAEVKKPGASVKVSCKASGYTVSRYWMIHWVRQAPGQGLEWI |
| | GRIDPNSGGTKYNQKFQGRVTMTRDTSTSTVYMELSSLRSEDTAVYYCVL |
| | TGTDFDYWGQGTLVTVSS (SEQ ID NO:1270) |
| 8F8V3-23 | EVQLLESGGGLVQPGGSLRLSCAASGYTVSRYWMHWVRQAPGKGLEWI |
| | GRIDPNSGGTKYNDSVKGRFTISRDNSKNTLYLQMNSLRAEDTAVYYCVL |
| | TGTDFDYWGQGTLVTVSS (SEQ ID NO:1271) |
| 8F8V1-69 | QVQLVQSGAEVKKPGSSVKVSCKASGYTVSRYWMHWVRQAPGQGLEWI |
| | GRIDPNSGGTKYNQKFQGRVTITADESTSTAYMELSSLRSEDTAVYYCVLT |
| | GTDFDYWGQGTLVTVSS (SEQ ID NO:1272) |
| 8F8V5-51 | EVQLVQSGAEVKKPGESLKISCKGSGYTVSRYWMHWVRQMPGKGLEWI |
| | GRIDPNSGGTKYNPSFQGQVTISADKSISTAYLQWSSLKASDTAMYYCVLT |
| | GTDFDYWGQGTLVTVSS (SEQ ID NO:1273) |
| 8F8V3-48 | EVQLVESGGGLVQPGGSLRLSCAASGYTVSRYWMHWVRQAPGKGLEWI |
| | GRIDPNSGGTKYNDSVKGRFTISRDNAKNSLYLQMNSLRAEDTAVYYCVL |
| | TGTDFDYWGQGTLVTVSS (SEQ ID NO:1274) |
| 8F8V3-30 | QVQLVESGGGVVQPGRSLRLSCAASGYTVSRYWMHWVRQAPGKGLEWI |
| | GRIDPNSGGTKYNDSVKGRFTISRDNSKNTLYLQMNSLRAEDTAVYYCVL |
| | TGTDFDYWGQGTLVTVSS (SEQ ID NO:1275) |
| 8F8V3-7 | EVQLVESGGGLVQPGGSLRLSCAASGYTVSRYWMHWVRQAPGKGLEWI |
| | GRIDPNSGGTKYNDSVKGRFTISRDNAKNSLYLQMNSLRAEDTAVYYCVL |
| | TGTDFDYWGQGTLVTVSS (SEQ ID NO:1274) |
| 8F8V4-59 | QVQLQESGPGLVKPSETLSLTCTVSGYTVSRYWMHWIRQPPGKGLEWIGR |
| | IDPNSGGTKYNPSLKSRVTISVDTSKNQFSLKLSSVTAADTAVYYCVLTGT |
| | DFDYWGQGTLVTVSS (SEQ ID NO:1276) |
| 8F8V3-15 | EVQLVESGGGLVKPGGSLRLSCAASGYTVSRYWMHWVRQAPGKGLEWI |
| | GRIDPNSGGTKYNAPVKGRFTISRDDSKNTLYLQMNSLKTEDTAVYYCVL |
| | TGTDFDYWGQGTLVTVSS (SEQ ID NO:1277) |
| 8F8V4-30-4 | QVQLQESGPGLVKPSQTLSLTCTVSGYTVSRYWNIHWIRQPPGKGLEWIGR |
| | IDPNSGGTKYNPSLKSRVTISVDTSKNQFSLKLSSVTAADTAVYYCVLTGT |
| | DFDYWGQGTLVTVSS (SEQ ID NO:1278) |

Antibody1H7

| | |
|---|---|
| 1H7V3-15 | EVQLVESGGGLVKPGGSLRLSCAASGFSFNTYAMNWVRQAPGKGLEWIA |
| | RIRSKSNNYATYYAAPVKGRFTISRDDSKNTLYLQMNSLKTEDTAVYYCV |
| | RHGDGNLWYIDVWGQGTLVTVSS (SEQ ID NO:1260) |
| 1H7V3-23 | EVQLLESGGGLVQPGGSLRLSCAASGFSFNTYAMNWVRQAPGKGLEWIA |
| | RIRSKSNNYATYYADSVKGRFTISRDNSKNTLYLQMNSLRAEDTAVYYCV |
| | RHGDGNLWYIDVWGQGTLVTVSS (SEQ ID NO:1262) |
| 1H7V3-48 | EVQLVESGGGLVQPGGSLRLSCAASGFSFNTYAMNWVRQAPGKGLEWIA |
| | RIRSKSNNYATYYADSVKGRFTISRDNAKNSLYLQMNSLRAEDTAVYYCV |
| | RHGDGNLWYIDVWGQGTLVTVSS (SEQ ID NO:1261) |
| 1H7V3-7 | EVQLVESGGGLVQPGGSLRLSCAASGFSFNTYAMNWVRQAPGKGLEWIA |
| | RIRSKSNNYATYYADSVKGRFTISRDNAKNSLYLQMNSLRAEDTAVYYCV |
| | RHGDGNLWYIDVWGQGTLVTVSS (SEQ ID NO:1261) |
| 1H7V3-30 | QVQLVESGGGVVQPGRSLRLSCAASGFSFNTYAMNWVRQAPGKGLEWIA |
| | RIRSKSNNYATYYADSVKGRFTISRDNSKNTLYLQMNSLRAEDTAVYYCV |
| | RHGDGNLWYIDVWGQGTLVTVSS (SEQ ID NO:1263) |
| 1H7V5-51 | EVQLVQSGAEVKKPGESLKISCKGSGFSFNTYAMNWVRQMPGKGLEWIA |
| | RIRSKSNNYATYYAPSFQGQVTISADKSISTAYLQWSSLKASDTAMYYCV |
| | RHGDGNLWYIDVWGQGTLVTVSS (SEQ ID NO:1265) |
| 1H7V1-69 | QVQLVQSGAEVKKPGSSVKVSCKASGFSFNTYAMNWVRQAPGQGLEWI |
| | ARIRSKSNNYATYYAQKFQGRVTITADESTSTAYMELSSLRSEDTAVYYC |
| | VRHGDGNLWYIDVWGQGTLVTVSS (SEQ ID NO:1264) |
| 1H7V1-46 | QVQLVQSGAEVKKPGASVKVSCKASGFSFNTYAMNWVRQAPGQGLEWI |
| | ARIRSKSNNYATYYAQKFQGRVTMTRDTSTSTVYMELSSLRSEDTAVYYC |
| | VRHGDGNLWYIDVWGQGTLVTVSS (SEQ ID NO:1266) |
| 1H7V4-59 | QVQLQESGPGLVKPSETLSLTCTVSGFSFNTYAMNWIRQPPGKGLEWIARI |
| | RSKSNNYATYYAPSLKSRVTISVDTSKNQFSLKLSSVTAADTAVYYCVRH |
| | GDGNLWYIDVWGQGTLVTVSS (SEQ ID NO:1267) |
| 1H7V4-30-4 | QVQLQESGPGLVKPSQTLSLTCTVSGFSFNTYAMNWIRQPPGKGLEWIARI |
| | RSKSNNYATYYAPSLKSRVTISVDTSKNQFSLKLSSVTAADTAVYYCVRH |
| | GDGNLWYIDVWGQGTLVTVSS (SEQ ID NO:1268) |

Antibody 2H8

| | |
|---|---|
| 2H8V3-15 | EVQLVESGGGLVKPGGSLRLSCAASGFSFNTYAMNWVRQAPGKGLEWIA |
| | RIRSKSNNYATYYAAPVKGRFTISRDDSKNTLYLQMNSLKTEDTAVYYCV |
| | RHGDGNLWYIDVWGQGTLVTVSS (SEQ ID NO:1260) |
| 2H8V3-48 | EVQLVESGGGLVQPGGSLRLSCAASGFSFNTYAMNWVRQAPGKGLEWIA |
| | RIRSKSNNYATYYADSVKGRFTISRDNAKNSLYLQMNSLRAEDTAVYYCV |
| | RHGDGNLWYIDVWGQGTLVTVSS (SEQ ID NO:1261) |
| 2H8V3-23 | EVQLLESGGGLVQPGGSLRLSCAASGFSFNTYAMNWVRQAPGKGLEWIA |
| | RIRSKSNNYATYYADSVKGRFTISRDNSKNTLYLQMNSLRAEDTAVYYCV |
| | RHGDGNLWYIDVWGQGTLVTVSS (SEQ ID NO:1262) |
| 2H8V3-7 | EVQLVESGGGLVQPGGSLRLSCAASGFSFNTYAMNWVRQAPGKGLEWIA |
| | RIRSKSNNYATYYADSVKGRFTISRDNAKNSLYLQMNSLRAEDTAVYYCV |
| | RHGDGNLWYIDVWGQGTLVTVSS (SEQ ID NO:1261) |
| 2H8V3-30 | QVQLVESGGGVVQPGRSLRLSCAASGFSFNTYAMNWVRQAPGKGLEWIA |
| | RIRSKSNNYATYYADSVKGRFTISRDNSKNTLYLQMNSLRAEDTAVYYCV |
| | RHGDGNLWYIDVWGQGTLVTVSS (SEQ ID NO:1263) |
| 2H8V5-51 | EVQLVQSGAEVKKPGESLKISCKGSGFSFNTYAMNWVRQMPGKGLEWIA |
| | RIRSKSNNYATYYAPSFQGQVTISADKSISTAYLQWSSLKASDTAMYYCV |
| | RHGDGNLWYIDVWGQGTLVTVSS (SEQ ID NO:1265) |
| 2H8V1-69 | QVQLVQSGAEVKKPGSSVKVSCKASGFSFNTYAMNWVRQAPGQGLEWI |
| | ARIRSKSNNYATYYAQKFQGRVTITADESTSTAYMELSSLRSEDTAVYYC |
| | VRHGDGNLWYIDVWGQGTLVTVSS (SEQ ID NO:1264) |
| 2H8V1-46 | QVQLVQSGAEVKKPGASVKVSCKASGFSFNTYAMNWVRQAPGQGLEWI |
| | ARIRSKSNNYATYYAQKFQGRVTMTRDTSTSTVYMELSSLRSEDTAVYYC |
| | VRHGDGNLWYIDVWGQGTLVTVSS (SEQ ID NO:1266) |
| 2H8V4-59 | QVQLQESGPGLVKPSETLSLTCTVSGFSFNTYAMNWIRQPPGKGLEWIARI |
| | RSKSNNYATYYAPSLKSRVTISVDTSKNQFSLKLSSVTAADTAVYYCVRH |
| | GDGNLWYIDVWGQGTLVTVSS (SEQ ID NO:1267) |
| 2H8V4-30-4 | QVQLQESGPGLVKPSQTLSLTCTVSGFSFNTYAMNWIRQPPGKGLEWIARI |
| | RSKSNNYATYYAPSLKSRVTISVDTSKNQFSLKLSSVTAADTAVYYCVRH |
| | GDGNLWYIDVWGQGTLVTVSS (SEQ ID NO:1268) |

Antibody 3A2

| | |
|---|---|
| 3A2V5-51 | EVQLVQSGAEVKKPGESLKISCKGSGYPFSNFWITWVRQMPGKGLEWIGD |
| | IYPGSDNSNYNPSFQGQVTISADKSISTAYLQWSSLKASDTAMYYCAREAY |
| | YTNPGFAYWGQGTLVTVSS (SEQ ID NO:1282) |
| 3A2V1-69 | QVQLVQSGAEVKKPGSSVKVSCKASGYPFSNFWITWVRQAPGQGLEWIG |
| | DIYPGSDNSNYNQKFQGRVTITADESTSTAYMELSSLRSEDTAVYYCAREA |
| | YYTNPGFAYWGQGTLVTVSS (SEQ ID NO:1283) |
| 3A2V1-46 | QVQLVQSGAEVKKPGASVKVSCKASGYPFSNFWITWVRQAPGQGLEWIG |
| | DIYPGSDNSNYNQKFQGRVTMTRDTSTSTVYMELSSLRSEDTAVYYCARE |
| | AYYTNPGFAYWGQGTLVTVSS (SEQ ID NO:1284) |
| 3A2V3-48 | EVQLVESGGGLVQPGGSLRLSCAASGYPFSNFWITWVRQAPGKGLEWIGD |
| | IYPGSDNSNYNDSVKGRFTISRDNAKNSLYLQMNSLRAEDTAVYYCAREA |
| | YYTNPGFAYWGQGTLVTVSS (SEQ ID NO:1285) |
| 3A2V3-30 | QVQLVESGGGVVQPGRSLRLSCAASGYPFSNFWITWVRQAPGKGLEWIG |
| | DIYPGSDNSNYNDSVKGRFTISRDNSKNTLYLQMNSLRAEDTAVYYCARE |
| | AYYTNPGFAYWGQGTLVTVSS (SEQ ID NO:1286) |
| 3A2V3-7 | EVQLVESGGGLVQPGGSLRLSCAASGYPFSNFWITWVRQAPGKGLEWIGD |
| | IYPGSDNSNYNDSVKGRFTISRDNAKNSLYLQMNSLRAEDTAVYYCAREA |
| | YYTNPGFAYWGQGTLVTVSS (SEQ ID NO:1285) |
| 3A2V3-23 | EVQLLESGGGLVQPGGSLRLSCAASGYPFSNFWITWVRQAPGKGLEWIGD |
| | IYPGSDNSNYNDSVKGRFTISRDNSKNTLYLQMNSLRAEDTAVYYCAREA |
| | YYTNPGFAYWGQGTLVTVSS (SEQ ID NO:1287) |
| 3A2V4-59 | QVQLQESGPGLVKPSETLSLTCTVSGYPFSNFWITWIRQPPGKGLEWIGDIY |
| | PGSDNSNYNPSLKSRVTISVDTSKNQFSLKLSSVTAADTAVYYCAREAYY |
| | TNPGFAYWGQGTLVTVSS (SEQ ID NO:1288) |
| IGHV3-15 | EVQLVESGGGLVKPGGSLRLSCAASGYPFSNFWITWVRQAPGKGLEWIGD |
| | IYPGSDNSNYNAPVKGRFTISRDDSKNTLYLQMNSLKTEDTAVYYCAREA |
| | YYTNPGFAYWGQGTLVTVSS (SEQ ID NO:1289) |
| 3A2V4-39 | QLQLQESGPGLVKPSETLSLTCTVSGYPFSNFWITWIRQPPGKGLEWIGDIY |
| | PGSDNSNYNPSLKSRVTISVDTSKNQFSLKLSSVTAADTAVYYCAREAYY |
| | TNPGFAYWGQGTLVTVSS (SEQ ID NO:1290) |

Antibody 3A7

| | |
|---|---|
| 3A7V3-15 | EVQLVESGGGLVKPGGSLRLSCAASGFTFSDAWMGWVRQAPGKGLEWV |
| | AEIRDKVKNHATYYAAPVKGRFTISRDDSKNTLYLQMNSLKTEDTAVYY |
| | CRLGVFDYWGQGTLVTVSS (SEQ ID NO:1250) |
| 3A7V3-7 | EVQLVESGGGLVQPGGSLRLSCAASGFTFSDAWMGWVRQAPGKGLEWV |
| | AEIRDKVKNHATYYADSVKGRFTISRDNAKNSLYLQMNSLRAEDTAVYY |
| | CRLGVFDYWGQGTLVTVSS (SEQ ID NO:1251) |
| 3A7V3-23 | EVQLLESGGGLVQPGGSLRLSCAASGFTFSDAWMGWVRQAPGKGLEWV |
| | AEIRDKVKNHATYYADSVKGRFTISRDNSKNTLYLQMNSLRAEDTAVYY |
| | CRLGVFDYWGQGTLVTVSS (SEQ ID NO:1252) |
| 3A7V3-48 | EVQLVESGGGLVQPGGSLRLSCAASGFTFSDAWMGWVRQAPGKGLEWV |
| | AEIRDKVKNHATYYADSVKGRFTISRDNAKNSLYLQMNSLRAEDTAVYY |
| | CRLGVFDYWGQGTLVTVSS (SEQ ID NO:1251) |
| 3A7V3-30 | QVQLVESGGGVVQPGRSLRLSCAASGFTFSDAWMGWVRQAPGKGLEWV |
| | AEIRDKVKNHATYYADSVKGRFTISRDNSKNTLYLQMNSLRAEDTAVYY |
| | CRLGVFDYWGQGTLVTVSS (SEQ ID NO:1253) |
| 3A7V1-69 | QVQLVQSGAEVKKPGSSVKVSCKASGFTFSDAWMGWVRQAPGQGLEWV |
| | AEIRDKVKNHATYYAQKFQGRVTITADESTSTAYMELSSLRSEDTAVYYC |
| | RLGVFDYWGQGTLVTVSS (SEQ ID NO:1254) |
| 3A7V1-46 | QVQLVQSGAEVKKPGASVKVSCKASGFTFSDAWMGWVRQAPGQGLEW |
| | VAEIRDKVKNHATYYAQKFQGRVTMTRDTSTSTVYMELSSLRSEDTAVY |
| | YCRLGVFDYWGQGTLVTVSS (SEQ ID NO:1255) |
| 3A7V5-51 | EVQLVQSGAEVKKPGESLKISCKGSGFTFSDAWMGWVRQMPGKGLEWV |
| | AEIRDKVKNHATYYAPSFQGQVTISADKSISTAYLQWSSLKASDTAMYYC |
| | RLGVFDYWGQGTLVTVSS (SEQ ID NO:1256) |
| 3A7V4-59 | QVQLQESGPGLVKPSETLSLTCTVSGFTFSDAWMGWIRQPPGKGLEWVAE |
| | IRDKVKNHATYYAPSLKSRVTISVDTSKNQFSLKLSSVTAADTAVYYCRL |
| | GVFDYWGQGTLVTVSS (SEQ ID NO:1257) |
| 3A7V4-39 | QLQLQESGPGLVKPSETLSLTCTVSGFTFSDAWMGWIRQPPGKGLEWVAE |
| | IRDKVKNHATYYAPSLKSRVTISVDTSKNQFSLKLSSVTAADTAVYYCRL |
| | GVFDYWGQGTLVTVSS (SEQ ID NO:1258) |

Antibody 3B10

| | |
|---|---|
| 3B10V3-15 | EVQLVESGGGLVKPGGSLRLSCAASGLTSNTYTQTWVRQAPGKGLEWES |
| | VIRSKSNNFSTLYAAPVKGRFTISRDD SKNTLYLQMNSLKTEDTAVYYCV |
| | RHKSNRYPGVYWGQGTLVTVSS (SEQ ID NO:1292) |
| 3B10V3-30 | QVQLVESGGGVVQPGRSLRLSCAASGLTSNTYTQTWVRQAPGKGLEWES |
| | VIRSKSNNFSTLYADSVKGRFTISRDNSKNTLYLQMNSLRAEDTAVYYCV |
| | RHKSNRYPGVYWGQGTLVTVSS (SEQ ID NO:1293) |
| 3B10V3-23 | EVQLLESGGGLVQPGGSLRLSCAASGLTSNTYTQTWVRQAPGKGLEWES |
| | VIRSKSNNFSTLYADSVKGRFTISRDNSKNTLYLQMNSLRAEDTAVYYCV |
| | RHKSNRYPGVYWGQGTLVTVSS (SEQ ID NO:1294) |
| 3B10V1-46 | QVQLVQSGAEVKKPGASVKVSCKASGLTSNTYTQTWVRQAPGQGLEWE |
| | SVIRSKSNNFSTLYAQKFQGRVTMTRDTSTSTVYMELSSLRSEDTAVYYC |
| | VRHKSNRYPGVYWGQGTLVTVSS (SEQ ID NO:1295) |
| 3B10V3-48 | EVQLVESGGGLVQPGGSLRLSCAASGLTSNTYTQTWVRQAPGKGLEWES |
| | VIRSKSNNFSTLYADSVKGRFTISRDNAKNSLYLQMNSLRAEDTAVYYCV |
| | RHKSNRYPGVYWGQGTLVTVSS (SEQ ID NO:1296) |
| 3B10V1-69 | QVQLVQSGAEVKKPGSSVKVSCKASGLTSNTYTQTWVRQAPGQGLEWES |
| | VIRSKSNNFSTLYAQKFQGRVTITADESTSTAYMELSSLRSEDTAVYYCVR |
| | HKSNRYPGVYWGQGTLVTVSS (SEQ ID NO:1297) |
| 3B10V3-7 | EVQLVESGGGLVQPGGSLRLSCAASGLTSNTYTQTWVRQAPGKGLEWES |
| | VIRSKSNNFSTLYADSVKGRFTISRDNAKNSLYLQMNSLRAEDTAVYYCV |
| | RHKSNRYPGVYWGQGTLVTVSS (SEQ ID NO:1296) |
| 3B10V5-51 | EVQLVQSGAEVKKPGESLKISCKGSGLTSNTYTQTWVRQMPGKGLEWES |
| | VIRSKSNNFSTLYAPSFQGQVTISADKSISTAYLQWSSLKASDTAMYYCVR |
| | HKSNRYPGVYWGQGTLVTVSS (SEQ ID NO:1298) |
| 3B10V4-59 | QVQLQESGPGLVKPSETLSLTCTVSGLTSNTYTQTWIRQPPGKGLEWESVI |
| | RSKSNNFSTLYAPSLKSRVTISVDTSKNQFSLKLSSVTAADTAVYYCVRHK |
| | SNRYPGVYWGQGTLVTVSS (SEQ ID NO:1299) |
| 3B10V4-39 | QLQLQESGPGLVKPSETLSLTCTVSGLTSNTYTQTWIRQPPGKGLEWESVI |
| | RSKSNNFSTLYAPSLKSRVTISVDTSKNQFSLKLSSVTAADTAVYYCVRHK |
| | SNRYPGVYWGQGTLVTVSS (SEQ ID NO:1300) |

Antibody 4F11

| | |
|---|---|
| 4F11V5-51 | EVQLVQSGAEVKKPGESLKISCKGSGYPFSNFWITWVRQMPGKGLEWIGD |
| | IYPGSDNSNYNPSFQGQVTISADKSISTAYLQWSSLKASDTAMYYCAREAY |
| | YTNPGFAYWGQGTLVTVSS (SEQ ID NO:1282) |
| 4F11V1-69 | QVQLVQSGAEVKKPGSSVKVSCKASGYPFSNFWITWVRQAPGQGLEWIG |
| | DIYPGSDNSNYNQKFQGRVTITADESTSTAYMELSSLRSEDTAVYYCAREA |
| | YYTNPGFAYWGQGTLVTVSS (SEQ ID NO:1283) |
| 4F 11V1-46 | QVQLVQSGAEVKKPGASVKVSCKASGYPFSNFWITWVRQAPGQGLEWIG |
| | DIYPGSDNSNYNQKFQGRVTMTRDTSTSTVYMELSSLRSEDTAVYYCARE |
| | AYYTNPGFAYWGQGTLVTVSS (SEQ ID NO:1284) |
| 4F11V3-48 | EVQLVESGGGLVQPGGSLRLSCAASGYPFSNFWITWVRQAPGKGLEWIGD |
| | IYPGSDNSNYNDSVKGRFTISRDNAKNSLYLQMNSLRAEDTAVYYCAREA |
| | YYTNPGFAYWGQGTLVTVSS (SEQ ID NO:1285) |
| 4F11V3-30 | QVQLVESGGGVVQPGRSLRLSCAASGYPFSNFWITWVRQAPGKGLEWIG |
| | DIYPGSDNSNYNDSVKGRFTISRDNSKNTLYLQMNSLRAEDTAVYYCARE |
| | AYYTNPGFAYWGQGTLVTVSS (SEQ ID NO:1286) |
| 4F11V3-7 | EVQLVESGGGLVQPGGSLRLSCAASGYPFSNFWITWVRQAPGKGLEWIGD |
| | IYPGSDNSNYNDSVKGRFTISRDNAKNSLYLQMNSLRAEDTAVYYCAREA |
| | YYTNPGFAYWGQGTLVTVSS (SEQ ID NO:1285) |
| 4F11V3-23 | EVQLLESGGGLVQPGGSLRLSCAASGYPFSNFWITWVRQAPGKGLEWIGD |
| | IYPGSDNSNYNDSVKGRFTISRDNSKNTLYLQMNSLRAEDTAVYYCAREA |
| | YYTNPGFAYWGQGTLVTVSS (SEQ ID NO:1287) |
| 4F11V4-59 | QVQLQESGPGLVKPSETLSLTCTVSGYPFSNFWITWIRQPPGKGLEWIGDIY |
| | PGSDNSNYNPSLKSRVTISVDTSKNQFSLKLSSVTAADTAVYYCAREAYY |
| | TNPGFAYWGQGTLVTVSS (SEQ ID NO:1288) |
| 4F11V3-15 | EVQLVESGGGLVKPGGSLRLSCAASGYPFSNFWITWVRQAPGKGLEWIGD |
| | IYPGSDNSNYNAPVKGRFTISRDDSKNTLYLQMNSLKTEDTAVYYCAREA |
| | YYTNPGFAYWGQGTLVTVSS (SEQ ID NO:1289) |
| 4F11V4-39 | QLQLQESGPGLVKPSETLSLTCTVSGYPFSNFWITWIRQPPGKGLEWIGDIY |
| | PGSDNSNYNPSLKSRVTISVDTSKNQFSLKLSSVTAADTAVYYCAREAYY |
| | TNPGFAYWGQGTLVTVSS (SEQ ID NO:1290) |

Antibody 6H6

| | |
|---|---|
| 6H6V3-15 | EVQLVESGGGLVKPGGSLRLSCAASGFTFSDAWMDWVRQAPGKGLEWW |
| | VAEIRNKVNNHATYYAPVKGRFTISRDDSKNTLYLQMNSLKTEDTAVYY |
| | CCTSLYDGYYLRFAWGQGTLVTVSS (SEQ ID NO:1302) |
| 6H6V3-7 | EVQLVESGGGLVQPGGSLRLSCAASGFTFSDAWMDWVRQAPGKGLEWW |
| | VAEIRNKVNNHATYYDSVKGRFTISRDNAKNSLYLQMNSLRAEDTAVYY |
| | CCTSLYDGYYLRFAWGQGTLVTVSS (SEQ ID NO:1303) |
| 6H6V3-23 | EVQLLESGGGLVQPGGSLRLSCAASGFTFSDAWMDWVRQAPGKGLEWW |
| | VAEIRNKVNNHATYYDSVKGRFTISRDNSKNTLYLQMNSLRAEDTAVYY |
| | CCTSLYDGYYLRFAWGQGTLVTVSS (SEQ ID NO:1304) |
| 6H6V3-48 | EVQLVESGGGLVQPGGSLRLSCAASGFTFSDAWMDWVRQAPGKGLEWW |
| | VAEIRNKVNNHATYYDSVKGRFTISRDNAKNSLYLQMNSLRAEDTAVYY |
| | CCTSLYDGYYLRFAWGQGTLVTVSS (SEQ ID NO:1303) |
| 6H6V3-30 | QVQLVESGGGVVQPGRSLRLSCAASGFTFSDAWMDWVRQAPGKGLEWW |
| | VAEIRNKVNNHATYYDSVKGRFTISRDNSKNTLYLQMNSLRAEDTAVYY |
| | CCTSLYDGYYLRFAWGQGTLVTVSS (SEQ ID NO:1305) |
| 6H6V1-46 | QVQLVQSGAEVKKPGASVKVSCKASGFTFSDAWMDWVRQAPGQGLEW |
| | WVAEIRNKVNNHATYYQKFQGRVTMTRDTSTSTVYMELSSLRSEDTAVY |
| | YCCTSLYDGYYLRFAWGQGTLVTVSS (SEQ ID NO:1306) |
| 6H6V 1-69 | QVQLVQSGAEVKKPGSSVKVSCKASGFTFSDAWMDWVRQAPGQGLEW |
| | WVAEIRNKVNNHATYYQKFQGRVTITADESTSTAYMELSSLRSEDTAVYY |
| | CCTSLYDGYYLRFAWGQGTLVTVSS (SEQ ID NO:1307) |
| 6H6V5-51 | EVQLVQSGAEVKKPGESLKISCKGSGFTFSDAWMDWVRQMPGKGLEWW |
| | VAEIRNKVNNHATYYPSFQGQVTISADKSISTAYLQWSSLKASDTAMYYC |
| | CTSLYDGYYLRFAWGQGTLVTVSS (SEQ ID NO:1308) |
| 6H6V4-59 | QVQLQESGPGLVKPSETLSLTCTVSGFTFSDAWMDWIRQPPGKGLEWWV |
| | AEIRNKVNNHATYYPSLKSRVTISVDTSKNQFSLKLSSVTAADTAVYYCCT |
| | SLYDGYYLRFAWGQGTLVTVSS (SEQ ID NO:1309) |
| 6H6V4-39 | QLQLQESGPGLVKPSETLSLTCTVSGFTFSDAWMDWIRQPPGKGLEWWV |
| | AEIRNKVNNHATYYPSLKSRVTISVDTSKNQFSLKLSSVTAADTAVYYCCT |
| | SLYDGYYLRFAWGQGTLVTVSS (SEQ ID NO:1310) |

Antibody7A9

| | |
|---|---|
| 7A9V3-15 | EVQLVESGGGLVKPGGSLRLSCAASGFTFNTYSMNWVRQAPGKGLEWVA |
| | HIKTKZNNFATFYAAPVKGRFTISRDDSKNTLYLQMNSLKTEDTAVYYCV |
| | ZHZSNNYPFAYWGQGTLVTVSS (SEQ ID NO:1312) |
| 7A9V3-48 | EVQLVESGGGLVQPGGSLRLSCAASGFTFNTYSMNWVRQAPGKGLEWVA |
| | HIKTKZNNFATFYADSVKGRFTISRDNAKNSLYLQMNSLRAEDTAVYYCV |
| | ZHZSNNYPFAYWGQGTLVTVSS (SEQ ID NO:1313) |
| 7A9V3-23 | EVQLLESGGGLVQPGGSLRLSCAASGFTFNTYSMNWVRQAPGKGLEWVA |
| | HIKTKZNNFATFYADSVKGRFTISRDNSKNTLYLQMNSLRAEDTAVYYCV |
| | ZHZSNNYPFAYWGQGTLVTVSS (SEQ ID NO:1314) |
| 7A9V3-7 | EVQLVESGGGLVQPGGSLRLSCAASGFTFNTYSMNWVRQAPGKGLEWVA |
| | HIKTKZNNFATFYADSVKGRFTISRDNAKNSLYLQMNSLRAEDTAVYYCV |
| | ZHZSNNYPFAYWGQGTLVTVSS (SEQ ID NO:1313) |
| 7A9V3-30 | QVQLVESGGGVVQPGRSLRLSCAASGFTFNTYSMNWVRQAPGKGLEWV |
| | AHIKTKZNNFATFYADSVKGRFTISRDNSKNTLYLQMNSLRAEDTAVYYC |
| | VZHZSNNYPFAYWGQGTLVTVSS (SEQ ID NO:1315) |
| 7A9V1-46 | QVQLVQSGAEVKKPGASVKVSCKASGFTFNTYSMNWVRQAPGQGLEWV |
| | AHIKTKZNNFATFYAQKFQGRVTMTRDTSTSTVYMELSSLRSEDTAVYYC |
| | VZHZSNNYPFAYWGQGTLVTVSS (SEQ ID NO:1316) |
| 7A9V1-69 | QVQLVQSGAEVKKPGSSVKVSCKASGFTFNTYSMNWVRQAPGQGLEWV |
| | AHIKTKZNNFATFYAQKFQGRVTITADESTSTAYMELSSLRSEDTAVYYCV |
| | ZHZSNNYPFAYWGQGTLVTVSS (SEQ ID NO:1317) |
| 7A9V5-51 | EVQLVQSGAEVKKPGESLKISCKGSGFTFNTYSMNWVRQMPGKGLEWVA |
| | HIKTKZNNFATFYAPSFQGQVTISADKSISTAYLQWSSLKASDTAMYYCVZ |
| | HZSNNYPFAYWGQGTLVTVSS (SEQ ID NO:1318) |
| 7A9V4-59 | QVQLQESGPGLVKPSETLSLTCTVSGFTFNTYSMNWIRQPPGKGLEWVAHI |
| | KTKZNNFATFYAPSLKSRVTISVDTSKNQFSLKLSSVTAADTAVYYCVZHZ |
| | SNNYPFAYWGQGTLVTVSS (SEQ ID NO:1319) |
| 7A9V4-30-4 | QVQLQESGPGLVKPSQTLSLTCTVSGFTFNTYSMNWIRQPPGKGLEWVAH |
| | IKTKZNNFATFYAPSLKSRVTISVDTSKNQFSLKLSSVTAADTAVYYCVZH |
| | ZSNNYPFAYWGQGTLVTVSS (SEQ ID NO:1320) |

Antibody 7B3

| | |
|---|---|
| 7B3V1-46 | QVQLVQSGAEVKKPGASVKVSCKASGYTFTTYWIHWVRQAPGQGLEWIG |
| | RNDPNSGGSNYNQKFQGRVTMTRDTSTSTVYMELSSLRSEDTAVYYCVR |
| | TNWDGDFWGQGTLVTVSS (SEQ ID NO:1322) |
| 7B3V5-51 | EVQLVQSGAEVKKPGESLKISCKGSGYTFTTYWIHWVRQMPGKGLEWIG |
| | RNDPNSGGSNYNPSFQGQVTISADKSISTAYLQWSSLKASDTAMYYCVRT |
| | NWDGDFWGQGTLVTVSS (SEQ ID NO:1323) |
| 7B3V1-69 | QVQLVQSGAEVKKPGSSVKVSCKASGYTFTTYWIHWVRQAPGQGLEWIG |
| | RNDPNSGGSNYNQKFQGRVTITADESTSTAYMELSSLRSEDTAVYYCVRT |
| | NWDGDFWGQGTLVTVSS (SEQ ID NO:1324) |
| 7B3V3-23 | EVQLLESGGGLVQPGGSLRLSCAASGYTFTTYWIHWVRQAPGKGLEWIG |
| | RNDPNSGGSNYNDSVKGRFTISRDNSKNTLYLQMNSLRAEDTAVYYCVR |
| | TNWDGDFWGQGTLVTVSS (SEQ ID NO:1325) |
| 7B3V3-7 | EVQLVESGGGLVQPGGSLRLSCAASGYTFTTYWIHWVRQAPGKGLEWIG |
| | RNDPNSGGSNYNDSVKGRFTISRDNAKNSLYLQMNSLRAEDTAVYYCVR |
| | TNWDGDFWGQGTLVTVSS (SEQ ID NO:1326) |
| 7B3V3 -30 | QVQLVESGGGVVQPGRSLRLSCAASGYTFTTYWIHWVRQAPGKGLEWIG |
| | RNDPNSGGSNYNDSVKGRFTISRDNSKNTLYLQMNSLRAEDTAVYYCVR |
| | TNWDGDFWGQGTLVTVSS (SEQ ID NO:1327) |
| 7B3V3-48 | EVQLVESGGGLVQPGGSLRLSCAASGYTFTTYWIHWVRQAPGKGLEWIG |
| | RNDPNSGGSNYNDSVKGRFTISRDNAKNSLYLQMNSLRAEDTAVYYCVR |
| | TNWDGDFWGQGTLVTVSS (SEQ ID NO:1326) |
| 7B3V4-59 | QVQLQESGPGLVKPSETLSLTCTVSGYTFTTYWIHWIRQPPGKGLEWIGRN |
| | DPNSGGSNYNPSLKSRVTISVDTSKNQFSLKLSSVTAADTAVYYCVRTNW |
| | DGDFWGQGTLVTVSS (SEQ ID NO:1328) |
| 7B3V3-15 | EVQLVESGGGLVKPGGSLRLSCAASGYTFTTYWIHWVRQAPGKGLE |
| | WIGRNDPNSGGSNYNAPVKGRFTISRDDSKNTLYLQMNSLKTEDTAV |
| | YYCVRTNWDGDFWGQGTLVTVSS (SEQ ID NO:1329) |
| 7B3V4-30-4 | QVQLQESGPGLVKPSQTLSLTCTVSGYTFTTYWIHWIRQPPGKGLEWI |
| | GRNDPNSGGSNYNPSLKSRVTISVDTSKNQFSLKLSSVTAADTAVYYC |
| | VRTNWDGDFWGQGTLVTVSS (SEQ ID NO:1330) |

Antibody 8A1

| | |
|---|---|
| 8A1V5-51 | EVQLVQSGAEVKKPGESLKISCKGSGYAFSNYWMSWVRQMPGKGLE |
| | WIGQIYPGDGDTKYNPSFQGQVTISADKSISTAYLQWSSLKASDTAM |
| | YYCSREKGADYYGSTYSAWFSYWGQGTLVTVSS (SEQ ID NO:1332) |
| 8A1V1-46 | QVQLVQSGAEVKKPGASVKVSCKASGYAFSNYWMSWVRQAPGQG |
| | LEWIGQIYPGDGDTKYNQKFQGRVTMTRDTSTSTVYMELSSLRSEDT |
| | AVYYCSREKGADYYGSTYSAWFSYWGQGTLVTVSS (SEQ ID NO:1333) |
| 8A1V3-23 | EVQLLESGGGLVQPGGSLRLSCAASGYAFSNYWMSWVRQAPGKGLE |
| | WIGQIYPGDGDTKYNDSVKGRFTISRDNSKNTLYLQMNSLRAEDTAV |
| | YYCSREKGADYYGSTYSAWFSYWGQGTLVTVSS (SEQ ID NO:1334) |
| 8A1V1-69 | QVQLVQSGAEVKKPGSSVKVSCKASGYAFSNYWMSWVRQAPGQGL |
| | EWIGQIYPGDGDTKYNQKFQGRVTITADESTSTAYMELSSLRSEDTAV |
| | YYCSREKGADYYGSTYSAWFSYWGQGTLVTVSS (SEQ ID NO:1335) |
| 8A1V3-7 | EVQLVESGGGLVQPGGSLRLSCAASGYAFSNYWMSWVRQAPGKGLE |
| | WIGQIYPGDGDTKYNDSVKGRFTISRDNAKNSLYLQMNSLRAEDTAV |
| | YYCSREKGADYYGSTYSAWFSYWGQGTLVTVSS (SEQ ID NO:1336) |
| 8A1V3-48 | EVQLVESGGGLVQPGGSLRLSCAASGYAFSNYWMSWVRQAPGKGLE |
| | WIGQIYPGDGDTKYNDSVKGRFTISRDNAKNSLYLQMNSLRAEDTAV |
| | YYCSREKGADYYGSTYSAWFSYWGQGTLVTVSS (SEQ ID NO:1336) |
| 8A1V3-30 | QVQLVESGGGVVQPGRSLRLSCAASGYAFSNYWMSWVRQAPGKGL |
| | EWIGQIYPGDGDTKYNDSVKGRFTISRDNSKNTLYLQMNSLRAEDTA |
| | VYYCSREKGADYYGSTYSAWFSYWGQGTLVTVSS (SEQ ID NO:1337) |
| 8A1V4-59 | QVQLQESGPGLVKPSETLSLTCTVSGYAFSNYWMSWIRQPPGKGLE |
| | WIGQIYPGDGDTKYNPSLKSRVTISVDTSKNQFSLKLSSVTAADTAVY |
| | YCSREKGADYYGSTYSAWFSYWGQGTLVTVSS (SEQ ID NO:1338) |
| 8A1V3-15 | EVQLVESGGGLVKPGGSLRLSCAASGYAFSNYWMSWVRQAPGKGLE |
| | WIGQIYPGDGDTKYNAPVKGRFTISRDDSKNTLYLQMNSLKTEDTAV |
| | YYCSREKGADYYGSTYSAWFSYWGQGTLVTVSS (SEQ ID NO:1339) |
| 8A1V4-30-4 | QVQLQESGPGLVKPSQTLSLTCTVSGYAFSNYWMSWIRQPPGKGLE |
| | WIGQIYPGDGDTKYNPSLKSRVTISVDTSKNQFSLKLSSVTAADTAVY |
| | YCSREKGADYYGSTYSAWFSYWGQGTLVTVSS (SEQ ID NO:1340) |

Antibody 9F5

| | |
|---|---|
| 9F5V5-51 | EVQLVQSGAEVKKPGESLKISCKGSGYAFSSSWMNWVRQMPGKGLE |
| | WIGRIYPGDGDTNYNPSFQGQVTISADKSISTAYLQWSSLKASDTAM |
| | YYCARLLRNQPGESYAMDYWGQGTLVTVSS (SEQ ID NO:1342) |
| 9F5V1-46 | QVQLVQSGAEVKKPGASVKVSCKASGYAFSSSWMNWVRQAPGQGL |
| | EWIGRIYPGDGDTNYNQKFQGRVTMTRDTSTSTVYMELSSLRSEDTA |
| | VYYCARLLRNQPGESYAMDYWGQGTLVTVSS (SEQ ID NO:1343) |
| 9F5V1-69 | QVQLVQSGAEVKKPGSSVKVSCKASGYAFSSSWMNWVRQAPGQGL |
| | EWIGRIYPGDGDTNYNQKFQGRVTITADESTSTAYMELSSLRSEDTAV |
| | YYCARLLRNQPGESYAMDYWGQGTLVTVSS (SEQ ID NO:1344) |
| 9F5V3 -23 | EVQLLESGGGLVQPGGSLRLSCAASGYAFSSSWMNWVRQAPGKGLE |
| | WIGRIYPGDGDTNYNDSVKGRFTISRDNSKNTLYLQMNSLRAEDTAV |
| | YYCARLLRNQPGESYAMDYWGQGTLVTVSS (SEQ ID NO:1345) |
| 9F5V3-7 | EVQLVESGGGLVQPGGSLRLSCAASGYAFSSSWMNWVRQAPGKGLE |
| | WIGRIYPGDGDTNYNDSVKGRFTISRDNAKNSLYLQMNSLRAEDTAV |
| | YYCARLLRNQPGESYAMDYWGQGTLVTVSS (SEQ ID NO:1346) |
| 9F5V3-48 | EVQLVESGGGLVQPGGSLRLSCAASGYAFSSSWMNWVRQAPGKGLE |
| | WIGRIYPGDGDTNYNDSVKGRFTISRDNAKNSLYLQMNSLRAEDTAV |
| | YYCARLLRNQPGESYAMDYWGQGTLVTVSS (SEQ ID NO:1346) |
| 9F5V3-30 | QVQLVESGGGVVQPGRSLRLSCAASGYAFSSSWMNWVRQAPGKGLE |
| | WIGRIYPGDGDTNYNDSVKGRFTISRDNSKNTLYLQMNSLRAEDTAV |
| | YYCARLLRNQPGESYAMDYWGQGTLVTVSS (SEQ ID NO:1347) |
| 9F5V4-59 | QVQLQESGPGLVKPSETLSLTCTVSGYAFSSSWMNWIRQPPGKGLE |
| | WIGRIYPGDGDTNYNPSLKSRVTISVDTSKNQFSLKLSSVTAADTAVY |
| | YCARLLRNQPGESYAMDYWGQGTLVTVSS (SEQ ID NO:1348) |
| 9F5V3-15 | EVQLVESGGGLVKPGGSLRLSCAASGYAFSSSWMNWVRQAPGKGLE |
| | WIGRIYPGDGDTNYNAPVKGRFTISRDDSKNTLYLQMNSLKTEDTAV |
| | YYCARLLRNQPGESYAMDYWGQGTLVTVSS (SEQ ID NO:1349) |
| 9F5V4-30-4 | QVQLQESGPGLVKPSQTLSLTCTVSGYAFSSSWMNWIRQPPGKGLE |
| | WIGRIYPGDGDTNYNPSLKSRVTISVDTSKNQFSLKLSSVTAADTAVY |
| | YCARLLRNQPGESYAMDYWGQGTLVTVSS (SEQ ID NO:1350) |
| 9F5-H1 | QVQLVQSGAEVKKPGASVKVSCKASGYAFSSSWMNWVRQAPGQGL |
| | EWMGRIYPGDGDTNYAQKFQGRVTMTRDTSTSTVYMELSSLRSEDT |
| | AVYYCARLLRNQPGESYAMDYWGQGTLVTVSS (SEQ ID NO:1665) |
| 9F5-H2 | QVQLVQSGAEVKKPGASVKVSCKASGYAFSSSWMNWVRQAPGQGL |
| | EWIGRIYPGDGDTNYAQKFQGRVTMTADTSTSTVYMELSSLRSEDTA |
| | VYYCARLLRNQPGESYAMDYWGQGTLVTVSS (SEQ ID NO:1666) |
| 9F5-H3 | QVQLVQSGAEVKKPGASLKISCKASGYAFSSSWMNWVRQAPGQGLE |
| | WIGRIYPGDGDTNYAQKFQGRATLTADTSTSTAYMELSSLRSEDTAV |
| | YYCARLLRNQPGESYAMDYWGQGALVTVSS (SEQ ID NO:1667) |

Antibody 9G1

| | |
|---|---|
| 9G1V5-51 | EVQLVQSGAEVKKPGESLKISCKGSGYIFTTYWIHWVRQMPGKGLE |
| | WIGRIDPNNGDTNYNPSFQGQVTISADKSISTAYLQWSSLKASDTAM |
| | YYCVMTGTDFDYWGQGTLVTVSS (SEQ ID NO:1352) |
| 9G1V1-46 | QVQLVQSGAEVKKPGASVKVSCKASGYIFTTYWIHWVRQAPGQGLE |
| | WIGRIDPNNGDTNYNQKFQGRVTMTRDTSTSTVYMELSSLRSEDTA |
| | VYYCVMTGTDFDYWGQGTLVTVSS (SEQ ID NO:1353) |
| 9G1V1-69 | QVQLVQSGAEVKKPGSSVKVSCKASGYIFTTYWIHWVRQAPGQGLE |
| | WIGRIDPNNGDTNYNQKFQGRVTITADESTSTAYMELSSLRSEDTAV |
| | YYCVMTGTDFDYWGQGTLVTVSS (SEQ ID NO:1354) |
| 9G1V3-23 | EVQLLESGGGLVQPGGSLRLSCAASGYIFTTYWIHWVRQAPGKGLEW |
| | IGRIDPNNGDTNYNDSVKGRFTISRDNSKNTLYLQMNSLRAEDTAVY |
| | YCVMTGTDFDYWGQGTLVTVSS (SEQ ID NO:1355) |
| 9G1V3-30 | QVQLVESGGGVVQPGRSLRLSCAASGYIFTTYWIHWVRQAPGKGLE |
| | WIGRIDPNNGDTNYNDSVKGRFTISRDNSKNTLYLQMNSLRAEDTA |
| | VYYCVMTGTDFDYWGQGTLVTVSS (SEQ ID NO:1356) |
| 9G1V3-7 | EVQLVESGGGLVQPGGSLRLSCAASGYIFTTYWIHWVRQAPGKGLE |
| | WIGRIDPNNGDTNYNDSVKGRFTISRDNAKNSLYLQMNSLRAEDTAV |
| | YYCVMTGTDFDYWGQGTLVTVSS (SEQ ID NO:1357) |
| 9G1V3-48 | EVQLVESGGGLVQPGGSLRLSCAASGYIFTTYWIHWVRQAPGKGLE |
| | WIGRIDPNNGDTNYNDSVKGRFTISRDNAKNSLYLQMNSLRAEDTAV |
| | YYCVMTGTDFDYWGQGTLVTVSS (SEQ ID NO:1357) |
| 9G1V4-59 | QVQLQESGPGLVKPSETLSLTCTVSGYIFTTYWIHWIRQPPGKGLEWI |
| | GRIDPNNGDTNYNPSLKSRVTISVDTSKNQFSLKLSSVTAADTAVYY |
| | CVMTGTDFDYWGQGTLVTVSS (SEQ ID NO:1358) |
| 9G1V3-15 | EVQLVESGGGLVKPGGSLRLSCAASGYIFTTYWIHWVRQAPGKGLE |
| | WIGRIDPNNGDTNYNAPVKGRFTISRDDSKNTLYLQMNSLKTEDTAV |
| | YYCVMTGTDFDYWGQGTLVTVSS (SEQ ID NO:1359) |
| 9G1V4-30-4 | QVQLQESGPGLVKPSQTLSLTCTVSGYIFTTYWIHWIRQPPGKGLEWI |
| | GRIDPNNGDTNYNPSLKSRVTISVDTSKNQFSLKLSSVTAADTAVYY |
| | CVMTGTDFDYWGQGTLVTVSS (SEQ ID NO:1360) |

Antibody 9G3

| | |
|---|---|
| 9G3V3 -15 | EVQLVESGGGLVKPGGSLRLSCAASGFNFNTYAMKWVRQAPGKGLE |
| | WIARIRSNSNDYATNYSAPVKGRFTISRDDSKNTLYLQMNSLKTEDTA |
| | VYYCVGHKINNYPFAHWGQGTLVTVSS (SEQ ID NO:1456) |
| 9G3V3-23 | EVQLLESGGGLVQPGGSLRLSCAASGFNFNTYAMKWVRQAPGKGLE |
| | WIARIRSNSNDYATNYSDSVKGRFTISRDNSKNTLYLQMNSLRAEDT |
| | AVYYCVGHKINNYPFAHWGQGTLVTVSS (SEQ ID NO:1457) |
| 9G3V3-30 | QVQLVESGGGVVQPGRSLRLSCAASGFNFNTYAMKWVRQAPGKGLE |
| | WIARIRSNSNDYATNYSDSVKGRFTISRDNSKNTLYLQMNSLRAEDTAV |
| | YYCVGHKINNYPFAHWGQGTLVTVSS (SEQ ID NO:1458) |
| 9G3V3-48 | EVQLVESGGGLVQPGGSLRLSCAASGFNFNTYAMKWVRQAPGKGLE |
| | WIARIRSNSNDYATNYSDSVKGRFTISRDNAKNSLYLQMNSLRAEDT |
| | AVYYCVGHKINNYPFAHWGQGTLVTVSS (SEQ ID NO:1459) |
| 9G3V3-7 | EVQLVESGGGLVQPGGSLRLSCAASGFNFNTYAMKWVRQAPGKGLE |
| | WIARIRSNSNDYATNYSDSVKGRFTISRDNAKNSLYLQMNSLRAEDT |
| | AVYYCVGHKINNYPFAHWGQGTLVTVSS (SEQ ID NO:1460) |
| 9G3V1-69 | QVQLVQSGAEVKKPGSSVKVSCKASGFNFNTYAMKWVRQAPGQGL |
| | EWIARIRSNSNDYATNYSQKFQGRVTITADESTSTAYMELSSLRSEDT |
| | AVYYCVGHKINNYPFAHWGQGTLVTVSS (SEQ ID NO:1461) |
| 9G3V1-46 | QVQLVQSGAEVKKPGASVKVSCKASGFNFNTYAMKWVRQAPGQGL |
| | EWIARIRSNSNDYATNYSQKFQGRVTMTRDTSTSTVYMELSSLRSEDT |
| | AVYYCVGHKINNYPFAHWGQGTLVTVSS (SEQ ID NO:1462) |
| 9G3V5-51 | EVQLVQSGAEVKKPGESLKISCKGSGFNFNTYAMKWVRQMPGKGL |
| | EWIARIRSNSNDYATNYSPSFQGQVTISADKSISTAYLQWSSLKASDT |
| | AMYYCVGHKINNYPFAHWGQGTLVTVSS (SEQ ID NO:1463) |
| 9G3V4-59 | QVQLQESGPGLVKPSETLSLTCTVSGFNFNTYAMKWIRQPPGKGLEWI |
| | ARIRSNSNDYATNYSPSLKSRVTISVDTSKNQFSLKLSSVTAADTAVYY |
| | CVGHKINNYPFAHWGQGTLVTVSS (SEQ ID NO:1464) |
| 9G3V4-30-4 | QVQLQESGPGLVKPSQTLSLTCTVSGFNFNTYAMKWIRQPPGKGLEWI |
| | ARIRSNSNDYATNYSPSLKSRVTISVDTSKNQFSLKLSSVTAADTAVYY |
| | CVGHKINNYPFAHWGQGTLVTVSS (SEQ ID NO:1465) |

Antibody10A9

| | |
|---|---|
| 10A9V5-51 | EVQLVQSGAEVKKPGESLKISCKGSGYPFSNFWITWVRQMPGKGLE |
| | WIGDIYPGSDNRNFNPSFQGQVTISADKSISTAYLQWSSLKASDTAMY |
| | YCAREAYYTNPGFAYWGQGTLVTVSS (SEQ ID NO:1362) |
| 10A9V1-69 | QVQLVQSGAEVKKPGSSVKVSCKASGYPFSNFWITWVRQAPGQGLE |
| | WIGDIYPGSDNRNFNQKFQGRVTITADESTSTAYMELSSLRSEDTAVY |
| | YCAREAYYTNPGFAYWGQGTLVTVSS (SEQ ID NO:1363) |
| 10A9V1-46 | QVQLVQSGAEVKKPGASVKVSCKASGYPFSNFWITWVRQAPGQGLE |
| | WIGDIYPGSDNRNFNQKFQGRVTMTRDTSTSTVYMELSSLRSEDTAV |
| | YYCAREAYYTNPGFAYWGQGTLVTVSS (SEQ ID NO:1364) |
| 10A9V3-48 | EVQLVESGGGLVQPGGSLRLSCAASGYPFSNFWITWVRQAPGKGLE |
| | WIGDIYPGSDNRNFNDSVKGRFTISRDNAKNSLYLQMNSLRAEDTAV |
| | YYCAREAYYTNPGFAYWGQGTLVTVSS (SEQ ID NO:1365) |
| 10A9V3-7 | EVQLVESGGGLVQPGGSLRLSCAASGYPFSNFWITWVRQAPGKGLE |
| | WIGDIYPGSDNRNFNDSVKGRFTISRDNAKNSLYLQMNSLRAEDTAV |
| | YYCAREAYYTNPGFAYWGQGTLVTVSS (SEQ ID NO:1365) |
| 10A9V3-30 | QVQLVESGGGVVQPGRSLRLSCAASGYPFSNFWITWVRQAPGKGLE |
| | WIGDIYPGSDNRNFNDSVKGRFTISRDNSKNTLYLQMNSLRAEDTAV |
| | YYCAREAYYTNPGFAYWGQGTLVTVSS (SEQ ID NO:1366) |
| 10A9V3-23 | EVQLLESGGGLVQPGGSLRLSCAASGYPFSNFWITWVRQAPGKGLE |
| | WIGDIYPGSDNRNFNDSVKGRFTISRDNSKNTLYLQMNSLRAEDTAV |
| | YYCAREAYYTNPGFAYWGQGTLVTVSS (SEQ ID NO:1367) |
| 10A9V4-59 | QVQLQESGPGLVKPSETLSLTCTVSGYPFSNFWITWIRQPPGKGLEWI |
| | GDIYPGSDNRNFNPSLKSRVTISVDTSKNQFSLKLSSVTAADTAVYYC |
| | AREAYYTNPGFAYWGQGTLVTVSS (SEQ ID NO:1368) |
| 10A9V3-15 | EVQLVESGGGLVKPGGSLRLSCAASGYPFSNFWITWVRQAPGKGLE |
| | WIGDIYPGSDNRNFNAPVKGRFTISRDDSKNTLYLQMNSLKTEDTAV |
| | YYCAREAYYTNPGFAYWGQGTLVTVSS (SEQ ID NO:1369) |
| 10A9V4-39 | QLQLQESGPGLVKPSETLSLTCTVSGYPFSNFWITWIRQPPGKGLEWI |
| | GDIYPGSDNRNFNPSLKSRVTISVDTSKNQFSLKLSSVTAADTAVYYC |
| | AREAYYTNPGFAYWGQGTLVTVSS (SEQ ID NO:1370) |

Antibody11A8

| | |
|---|---|
| 11A8V3-15 | EVQLVESGGGLVKPGGSLRLSCAASGFNFNTYAMNWVRQAPGKGLE |
| | WVARIRSKSNNYATYYAAPVKGRFTISRDDSKNTLYLQMNSLKTEDT |
| | AVYYCVRHYSNYGWGFAYWGQGTLVTVSS (SEQ ID NO:1372) |
| 11A8V3-48 | EVQLVESGGGLVQPGGSLRLSCAASGFNFNTYAMNWVRQAPGKGLE |
| | WVARIRSKSNNYATYYADSVKGRFTISRDNAKNSLYLQMNSLRAED |
| | TAVYYCVRHYSNYGWGFAYWGQGTLVTVSS (SEQ ID NO:1373) |
| 11A8V3-23 | EVQLLESGGGLVQPGGSLRLSCAASGFNFNTYAMNWVRQAPGKGLE |
| | WVARIRSKSNNYATYYADSVKGRFTISRDNSKNTLYLQMNSLRAEDT |
| | AVYYCVRHYSNYGWGFAYWGQGTLVTVSS (SEQ ID NO:1374) |
| 11A8V3-30 | QVQLVESGGGVVQPGRSLRLSCAASGFNFNTYAMNWVRQAPGKGL |
| | EWVARIRSKSNNYATYYADSVKGRFTISRDNSKNTLYLQMNSLRAED |
| | TAVYYCVRHYSNYGWGFAYWGQGTLVTVSS (SEQ ID NO:1375) |
| 11A8V3-7 | EVQLVESGGGLVQPGGSLRLSCAASGFNFNTYAMNWVRQAPGKGLE |
| | WVARIRSKSNNYATYYADSVKGRFTISRDNAKNSLYLQMNSLRAED |
| | TAVYYCVRHYSNYGWGFAYWGQGTLVTVSS (SEQ ID NO:1373) |
| 11A8V1-69 | QVQLVQSGAEVKKPGSSVKVSCKASGFNFNTYAMNWVRQAPGQGL |
| | EWVARIRSKSNNYATYYAQKFQGRVTITADESTSTAYMELSSLRSED |
| | TAVYYCVRHYSNYGWGFAYWGQGTLVTVSS (SEQ ID NO:1376) |
| 11A8V1-46 | QVQLVQSGAEVKKPGASVKVSCKASGFNFNTYAMNWVRQAPGQGL |
| | EWVARIRSKSNNYATYYAQKFQGRVTMTRDTSTSTVYMELSSLRSE |
| | DTAVYYCVRHYSNYGWGFAYWGQGTLVTVSS (SEQ ID NO:1377) |
| 11A8V5-51 | EVQLVQSGAEVKKPGESLKISCKGSGFNFNTYAMNWVRQMPGKGLE |
| | WVARIRSKSNNYATYYAPSFQGQVTISADKSISTAYLQWSSLKASDT |
| | AMYYCVRHYSNYGWGFAYWGQGTLVTVSS (SEQ ID NO:1378) |
| 11A8V4-59 | QVQLQESGPGLVKPSETLSLTCTVSGFNFNTYAMNWIRQPPGKGLEW |
| | VARIRSKSNNYATYYAPSLKSRVTISVDTSKNQFSLKLSSVTAADTAV |
| | YYCVRHYSNYGWGFAYWGQGTLVTVSS (SEQ ID NO:1379) |
| 11A8V4-39 | QLQLQESGPGLVKPSETLSLTCTVSGFNFNTYAMNWIRQPPGKGLEW |
| | VARIRSKSNNYATYYAPSLKSRVTISVDTSKNQFSLKLSSVTAADTAV |
| | YYCVRHYSNYGWGFAYWGQGTLVTVSS (SEQ ID NO:1380) |

Antibody12D9

| | |
|---|---|
| 12D9V1-46 | QVQLVQSGAEVKKPGASVKVSCKASGYTFSDYYIHWVRQAPGQGLE |
| | WIGYIYPNNGDNGYNQKFQGRVTMTRDTSTSTVYMELSSLRSEDTA |
| | VYYCARRGYYGGSYDYWGQGTLVTVSS (SEQ ID NO:1382) |
| 12D9V5-51 | EVQLVQSGAEVKKPGESLKISCKGSGYTFSDYYIHWVRQMPGKGLE |
| | WIGYIYPNNGDNGYNPSFQGQVTISADKSISTAYLQWSSLKASDTAM |
| | YYCARRGYYGGSYDYWGQGTLVTVSS (SEQ ID NO:1383) |
| 12D9V1-69 | QVQLVQSGAEVKKPGSSVKVSCKASGYTFSDYYIHWVRQAPGQGLE |
| | WIGYIYPNNGDNGYNQKFQGRVTITADESTSTAYMELSSLRSEDTAV |
| | YYCARRGYYGGSYDYWGQGTLVTVSS (SEQ ID NO:1384) |
| 12D9V3-48 | EVQLVESGGGLVQPGGSLRLSCAASGYTFSDYYIHWVRQAPGKGLE |
| | WIGYIYPNNGDNGYNDSVKGRFTISRDNAKNSLYLQMNSLRAEDTA |
| | VYYCARRGYYGGSYDYWGQGTLVTVSS (SEQ ID NO:1385) |
| 12D9V3-30 | QVQLVESGGGVVQPGRSLRLSCAASGYTFSDYYIHWVRQAPGKGLE |
| | WIGYIYPNNGDNGYNDSVKGRFTISRDNSKNTLYLQMNSLRAEDTAV |
| | YYCARRGYYGGSYDYWGQGTLVTVSS (SEQ ID NO:1386) |
| 12D9V3-23 | EVQLLESGGGLVQPGGSLRLSCAASGYTFSDYYIHWVRQAPGKGLE |
| | WIGYIYPNNGDNGYNDSVKGRFTISRDNSKNTLYLQMNSLRAEDTAV |
| | YYCARRGYYGGSYDYWGQGTLVTVSS (SEQ ID NO:1387) |
| 12D9V3-7 | EVQLVESGGGLVQPGGSLRLSCAASGYTFSDYYIHWVRQAPGKGLE |
| | WIGYIYPNNGDNGYNDSVKGRFTISRDNAKNSLYLQMNSLRAEDTA |
| | VYYCARRGYYGGSYDYWGQGTLVTVSS (SEQ ID NO:1385) |
| 12D9V4-59 | QVQLQESGPGLVKPSETLSLTCTVSGYTFSDYYIHWIRQPPGKGLEWI |
| | GYIYPNNGDNGYNPSLKSRVTISVDTSKNQFSLKLSSVTAADTAVYY |
| | CARRGYYGGSYDYWGQGTLVTVSS (SEQ ID NO:1388) |
| 12D9V3-15 | EVQLVESGGGLVKPGGSLRLSCAASGYTFSDYYIHWVRQAPGKGLE |
| | WIGYIYPNNGDNGYNAPVKGRFTISRDDSKNTLYLQMNSLKTEDTAV |
| | YYCARRGYYGGSYDYWGQGTLVTVSS (SEQ ID NO:1389) |
| 12D9V4-30-4 | QVQLQESGPGLVKPSQTLSLTCTVSGYTFSDYYTHWIRQPPGKGLEWI |
| | GYIYPNNGDNGYNPSLKSRVTISVDTSKNQFSLKLSSVTAADTAVYY |
| | CARRGYYGGSYDYWGQGTLVTVSS (SEQ ID NO:1390) |

Antibody 12F9

| | |
|---|---|
| 12F9V3-15 | EVQLVESGGGLVKPGGSLRLSCAASGFRFNTYAMTWVRQAPGKGLE |
| | WEGVIRRKSSNFATLYAAPVKGRFTISRDDSKNTLYLQMNSLKTEDT |
| | AVYYCVRHKSNKYPFVYWGQGTLVTVSS (SEQ ID NO:1392) |
| 12F9V3-23 | EVQLLESGGGLVQPGGSLRLSCAASGFRFNTYAMTWVRQAPGKGLE |
| | WEGVIRRKSSNFATLYADSVKGRFTISRDNSKNTLYLQMNSLRAEDT |
| | AVYYCVRHKSNKYPFVYWGQGTLVTVSS (SEQ ID NO:1393) |
| 12F9V3-48 | EVQLVESGGGLVQPGGSLRLSCAASGFRFNTYAMTWVRQAPGKGLE |
| | WEGVIRRKSSNFATLYADSVKGRFTISRDNAKNSLYLQMNSLRAEDT |
| | AVYYCVRHKSNKYPFVYWGQGTLVTVSS (SEQ ID NO:1394) |
| 12F9V3-30 | QVQLVESGGGVVQPGRSLRLSCAASGFRFNTYAMTWVRQAPGKGLE |
| | WEGVIRRKSSNFATLYADSVKGRFTISRDNSKNTLYLQMNSLRAEDT |
| | AVYYCVRHKSNKYPFVYWGQGTLVTVSS (SEQ ID NO:1395) |
| 12F9V3-7 | EVQLVESGGGLVQPGGSLRLSCAASGFRFNTYAMTWVRQAPGKGLE |
| | WEGVIRRKSSNFATLYADSVKGRFTISRDNAKNSLYLQMNSLRAEDT |
| | AVYYCVRHKSNKYPFVYWGQGTLVTVSS (SEQ ID NO:1394) |
| 12F9V1-69 | QVQLVQSGAEVKKPGSSVKVSCKASGFRFNTYAMTWVRQAPGQGL |
| | EWEGVIRRKSSNFATLYAQKFQGRVTITADESTSTAYMELSSLRSEDT |
| | AVYYCVRHKSNKYPFVYWGQGTLVTVSS (SEQ ID NO:1396) |
| 12F9V1-46 | QVQLVQSGAEVKKPGASVKVSCKASGFRFNTYAMTWVRQAPGQGL |
| | EWEGVIRRKSSNFATLYAQKFQGRVTMTRDTSTSTVYMELSSLRSED |
| | TAVYYCVRHKSNKYPFVYWGQGTLVTVSS (SEQ ID NO:1397) |
| 12F9V5-51 | EVQLVQSGAEVKKPGESLKISCKGSGFRFNTYAMTWVRQMPGKGLE |
| | WEGVIRRKSSNFATLYAPSFQGQVTISADKSISTAYLQWSSLKASDTA |
| | MYYCVRHKSNKYPFVYWGQGTLVTVSS (SEQ ID NO:1398) |
| 12F9V4-59 | QVQLQESGPGLVKPSETLSLTCTVSGFRFNTYAMTWIRQPPGKGLEW |
| | EGVIRRKSSNFATLYAPSLKSRVTISVDTSKNQFSLKLSSVTAADTAV |
| | YYCVRHKSNKYPFVYWGQGTLVTVSS (SEQ ID NO:1399) |
| 12F9V4-39 | QLQLQESGPGLVKPSETLSLTCTVSGFRFNTYAMTWIRQPPGKGLEW |
| | EGVIRRKSSNFATLYAPSLKSRVTISVDTSKNQFSLKLSSVTAADTAV |
| | YYCVRHKSNKYPFVYWGQGTLVTVSS (SEQ ID NO:1400) |

Antibodyl0C1

| | |
|---|---|
| 10C1V3-15 | EVQLVESGGGLVKPGGSLRLSCAASGFTFSDAWMDWVRQAPGKGLE |
| | WVAEIRNKINNHATYYAAPVKGRFTISRDDSKNTLYLQMNSLKTEDT |
| | AVYYCTSLYDGSYLRFAYWGQGTLVTVSS (SEQ ID NO:1467) |
| 10C1V3-7 | EVQLVESGGGLVQPGGSLRLSCAASGFTFSDAWMDWVRQAPGKGLE |
| | WVAEIRNKINNHATYYADSVKGRFTISRDNAKNSLYLQMNSLRAEDT |
| | AVYYCTSLYDGSYLRFAYWGQGTLVTVSS (SEQ ID NO:1468) |
| 10C1V3-23 | EVQLLESGGGLVQPGGSLRLSCAASGFTFSDAWMDWVRQAPGKGLE |
| | WVAEIRNKINNHATYYADSVKGRFTISRDNSKNTLYLQMNSLRAEDT |
| | AVYYCTSLYDGSYLRFAYWGQGTLVTVSS (SEQ ID NO:1469) |
| 10C1V3-30 | QVQLVESGGGVVQPGRSLRLSCAASGFTFSDAWMDWVRQAPGKGL |
| | EWVAEIRNKINNHATYYADSVKGRFTISRDNSKNTLYLQMNSLRAED |
| | TAVYYCTSLYDGSYLRFAYWGQGTLVTVSS (SEQ ID NO:1470) |
| 10C1V3-48 | EVQLVESGGGLVQPGGSLRLSCAASGFTFSDAWMDWVRQAPGKGLE |
| | WVAEIRNKINNHATYYADSVKGRFTISRDNAKNSLYLQMNSLRAEDT |
| | AVYYCTSLYDGSYLRFAYWGQGTLVTVSS (SEQ ID NO:1471) |
| 10C1V1-69 | QVQLVQSGAEVKKPGSSVKVSCKASGFTFSDAWMDWVRQAPGQGL |
| | EWVAEIRNKINNHATYYAQKFQGRVTITADESTSTAYMELSSLRSEDT |
| | AVYYCTSLYDGSYLRFAYWGQGTLVTVSS (SEQ ID NO:1472) |
| 10C1V1-46 | QVQLVQSGAEVKKPGASVKVSCKASGFTFSDAWMDWVRQAPGQGL |
| | EWVAEIRNKINNHATYYAQKFQGRVTMTRDTSTSTVYMELSSLRSED |
| | TAVYYCTSLYDGSYLRFAYWGQGTLVTVSS (SEQ ID NO:1473) |
| 10C1V5-51 | EVQLVQSGAEVKKPGESLKISCKGSGFTFSDAWMDWVRQMPGKGLE |
| | WVAEIRNKINNHATYYAPSFQGQVTISADKSISTAYLQWSSLKASDTA |
| | MYYCTSLYDGSYLRFAYWGQGTLVTVSS (SEQ ID NO:1474) |
| 10C1V4-59 | QVQLQESGPGLVKPSETLSLTCTVSGFTFSDAWMDWIRQPPGKGLEW |
| | VAEIRNKINNHATYYAPSLKSRVTISVDTSKNQFSLKLSSVTAADTAV |
| | YYCTSLYDGSYLRFAYWGQGTLVTVSS (SEQ ID NO:1475) |
| 10C1V4-30-4 | QVQLQESGPGLVKPSQTLSLTCTVSGFTFSDAWMDWIRQPPGKGLEW |
| | VAEIRNKINNHATYYAPSLKSRVTISVDTSKNQFSLKLSSVTAADTAV |
| | YYCTSLYDGSYLRFAYWGQGTLVTVSS (SEQ ID NO:1476) |

Antibody 7E9

| | |
|---|---|
| 7E9V1-46 | QVQLVQSGAEVKKPGASVKVSCKASGYTFTEYTMIHWVRQAPGQGL |
| | EWIGGINPNNGGTSYKQKFQGRVTMTRDTSTSTVYMELSSLRSEDTA |
| | VYYCARGGSHYYAMDYWGQGTLVTVSS (SEQ ID NO:1478) |
| 7E9V1-69 | QVQLVQSGAEVKKPGSSVKVSCKASGYTFTEYTMIHWVRQAPGQGL |
| | EWIGGINPNNGGTSYKQKFQGRVTITADESTSTAYMELSSLRSEDTAV |
| | YYCARGGSHYYAMDYWGQGTLVTVSS (SEQ ID NO:1479) |
| 7E9V5-51 | EVQLVQSGAEVKKPGESLKISCKGSGYTFTEYTMIHWVRQMPGKGLE |
| | WIGGINPNNGGTSYKPSFQGQVTISADKSISTAYLQWSSLKASDTAMY |
| | YCARGGSHYYAMDYWGQGTLVTVSS (SEQ ID NO:1480) |
| 7E9V3-23 | EVQLLESGGGLVQPGGSLRLSCAASGYTFTEYTMEIWVRQAPGKGLE |
| | WIGGINPNNGGTSYKDSVKGRFTISRDNSKNTLYLQMNSLRAEDTAV |
| | YYCARGGSHYYAMDYWGQGTLVTVSS (SEQ ID NO:1481) |
| 7E9V3-30 | QVQLVESGGGVVQPGRSLRLSCAASGYTFTEYTMEIWVRQAPGKGLE |
| | WIGGINPNNGGTSYKDSVKGRFTISRDNSKNTLYLQMNSLRAEDTAV |
| | YYCARGGSHYYAMDYWGQGTLVTVSS (SEQ ID NO:1482) |
| 7E9V3-48 | EVQLVESGGGLVQPGGSLRLSCAASGYTFTEYTMEIWVRQAPGKGLE |
| | WIGGINPNNGGTSYKDSVKGRFTISRDNAKNSLYLQMNSLRAEDTAV |
| | YYCARGGSHYYAMDYWGQGTLVTVSS (SEQ ID NO:1483) |
| 7E9V3-7 | EVQLVESGGGLVQPGGSLRLSCAASGYTFTEYTMEIWVRQAPGKGLE |
| | WIGGINPNNGGTSYKDSVKGRFTISRDNAKNSLYLQMNSLRAEDTAV |
| | YYCARGGSHYYAMDYWGQGTLVTVSS (SEQ ID NO:1484) |
| 7E9V4-59 | QVQLQESGPGLVKPSETLSLTCTVSGYTFTEYTMEIWIRQPPGKGLEWI |
| | GGINPNNGGTSYKPSLKSRVTISVDTSKNQFSLKLSSVTAADTAVYYC |
| | ARGGSHYYAMDYWGQGTLVTVSS (SEQ ID NO:1485) |
| 7E9V3-15 | EVQLVESGGGLVKPGGSLRLSCAASGYTFTEYTMEIWVRQAPGKGLE |
| | WIGGINPNNGGTSYKAPVKGRFTISRDDSKNTLYLQMNSLKTEDTAV |
| | YYCARGGSHYYAMDYWGQGTLVTVSS (SEQ ID NO:1486) |
| 7E9V4-39 | QLQLQESGPGLVKPSETLSLTCTVSGYTFTEYTMEIWIRQPPGKGLEWI |
| | GGINPNNGGTSYKPSLKSRVTISVDTSKNQFSLKLSSVTAADTAVYYC |
| | ARGGSHYYAMDYWGQGTLVTVSS (SEQ ID NO:1487) |

Antibody 8C3

| | |
|---|---|
| 8C3V1-46 | QVQLVQSGAEVKKPGASVKVSCKASGYSFTGYYMEIWVRQAPGQGL |
| | EWIGRVNPNNGGTSYNQKFQGRVTMTRDTSTSTVYMELSSLRSEDTA |
| | VYYCVLTGGYFDYWGQGTLVTVSS (SEQ ID NO:1489) |
| 8C3V5-51 | EVQLVQSGAEVKKPGESLKISCKGSGYSFTGYYMEIWVRQMPGKGLE |
| | WIGRVNPNNGGTSYNPSFQGQVTISADKSISTAYLQWSSLKASDTAM |
| | YYCVLTGGYFDYWGQGTLVTVSS (SEQ ID NO:1490) |
| 8C3V3-23 | EVQLLESGGGLVQPGGSLRLSCAASGYSFTGYYMEIWVRQAPGKGLE |
| | WIGRVNPNNGGTSYNDSVKGRFTISRDNSKNTLYLQMNSLRAEDTA |
| | VYYCVLTGGYFDYWGQGTLVTVSS (SEQ ID NO:1491) |
| 8C3V1-69 | QVQLVQSGAEVKKPGSSVKVSCKASGYSFTGYYMHWVRQAPGQGL |
| | EWIGRVNPNNGGTSYNQKFQGRVTITADESTSTAYMELSSLRSEDTA |
| | VYYCVLTGGYFDYWGQGTLVTVSS (SEQ ID NO:1492) |
| 8C3V3-30 | QVQLVESGGGVVQPGRSLRLSCAASGYSFTGYYMHWVRQAPGKGL |
| | EWIGRVNPNNGGTSYNDSVKGRFTISRDNSKNTLYLQMNSLRAEDTA |
| | VYYCVLTGGYFDYWGQGTLVTVSS (SEQ ID NO:1493) |
| 8C3V3-48 | EVQLVESGGGLVQPGGSLRLSCAASGYSFTGYYMEIWVRQAPGKGLE |
| | WIGRVNPNNGGTSYNDSVKGRFTISRDNAKNSLYLQMNSLRAEDTA |
| | VYYCVLTGGYFDYWGQGTLVTVSS (SEQ ID NO:1494) |
| 8C3V3-7 | EVQLVESGGGLVQPGGSLRLSCAASGYSFTGYYMEIWVRQAPGKGLE |
| | WIGRVNPNNGGTSYNDSVKGRFTISRDNAKNSLYLQMNSLRAEDTA |
| | VYYCVLTGGYFDYWGQGTLVTVSS (SEQ ID NO:1495) |
| 8C3V4-59 | QVQLQESGPGLVKPSETLSLTCTVSGYSFTGYYMEIWIRQPPGKGLEW |
| | IGRVNPNNGGTSYNPSLKSRVTISVDTSKNQFSLKLSSVTAADTAVYY |
| | CVLTGGYFDYWGQGTLVTVSS (SEQ ID NO:1496) |
| 8C3V3-15 | EVQLVESGGGLVKPGGSLRLSCAASGYSFTGYYMEIWVRQAPGKGLE |
| | WIGRVNPNNGGTSYNAPVKGRFTISRDDSKNTLYLQMNSLKTEDTAV |
| | YYCVLTGGYFDYWGQGTLVTVSS (SEQ ID NO:1497) |
| 8C3V4-39 | QLQLQESGPGLVKPSETLSLTCTVSGYSFTGYYMEIWIRQPPGKGLEW |
| | IGRVNPNNGGTSYNPSLKSRVTISVDTSKNQFSLKLSSVTAADTAVYY |
| | CVLTGGYFDYWGQGTLVTVSS (SEQ ID NO:1498) |

[0338] In some embodiments, anti-TREM2 antibodies of the present disclosure comprise a light chain variable region of any one of the antibodies listed in TABLES D1-D6, or selected from 1A7, 3A2, 3B 10, 6G12, 6H6, 7A9, 7B3, 8A1, 8E10, 8F11, 8F8, 9F5, 9F5v2, 9G1, 9G3, 10A9, 10C1, 11A8, 12E2, 12F9, 12G6, 2C7, 2F5, 3C1, 4D7, 4D11, 6C11, 6G12, 7A3, 7C5, 7E9, 7F6, 7G1, 7H1, 8C3, 8F10, 12A1, 1E9, 2C5, 3C5, 4C12, 4F2, 5A2, 6B3, 7D1, 7D9, 11D8, 8A12, 10E7, 10B 11, 10D2, 7D5, 2A7, 3G12, 6H9, 8G9, 9B4, 10A1, 11A8, 12F3, 2F8, 10E3, 1H7, 2F6, 2H8, 3A7, 7E5, 7E5v2, 7F8, 11H5, 7C5, 4F11, 12D9, 1B4v1, 1B4V2, 6H2, 7B11v1, 7B11v2, 18D8, 18E4v1, 18E4v2, 29F6v1, 29F6v2, 40D5v1, 40D5v2, 43B9, 44A8v1, 44A8v2, 44B4v1, and 44B4v2; and/or a heavy chain variable region of any one of the antibodies listed in TABLES D1-D6, or selected from 1A7, 3A2, 3B 10, 6G12, 6H6, 7A9, 7B3, 8A1, 8E10, 8F11, 8F8, 9F5, 9G1, 9G3, 10A9, 10C1, 11A8, 12E2, 12F9, 12G6, 2C7, 2F5, 3C1, 4D7, 4D11, 6C11, 6G12, 7A3, 7C5, 7E9, 7F6, 7G1, 7H1, 8C3, 8F10, 12A1, 1E9, 2C5, 3C5, 4C12, 4F2, 5A2, 6B3, 7D1, 7D9, 11D8, 8A12, 10E7, 10B 11, 10D2, 7D5, 2A7, 3G12, 6H9, 8G9, 9B4, 10A1, 11A8, 12F3, 2F8, 10E3, 1H7, 2F6, 2H8, 3A7, 7E5, 7F8, 11H5, 7C5, 4F11, 12D9,1B4v1, 1B4V2, 6H2, 7B11v1, 7B 11v2, 18D8, 18E4v1, 18E4v2, 29F6v1, 29F6v2, 40D5v1, 40D5v2, 43B9, 44A8v1, 44A8v2, 44B4v1, and 44B4v2.

[0339] In some embodiments, the anti-TREM2 antibody is an anti-TREM2 monoclonal antibody selected from 1A7, 3A2, 3B 10, 6G12, 6H6, 7A9, 7B3, 8A1, 8E10, 8F11, 8F8, 9F5, 9G1, 9G3, 10A9, 10C1, 11A8, 12E2, 12F9, 12G6, 2C7, 2F5, 3C1, 4D7, 4D11, 6C11, 6G12, 7A3, 7C5, 7E9, 7F6, 7G1, 7H1, 8C3, 8F10, 12A1, 1E9, 2C5, 3C5, 4C12, 4F2, 5A2, 6B3, 7D1, 7D9, 11D8, 8A12, 10E7, 10B 11, 10D2, 7D5, 2A7, 3G12, 6H9, 8G9, 9B4, 10A1, 11A8, 12F3, 2F8, 10E3, 1H7, 2F6, 2H8, 3A7, 7E5, 7F8, 11H5, 7C5, 4F11, 12D9,1B4v1, 1B4V2, 6H2, 7B11v1, 7B 11v2, 18D8, 18E4v1, 18E4v2, 29F6v1, 29F6v2, 40D5v1, 40D5v2, 43B9, 44A8v1, 44A8v2, 44B4v1, and 44B4v2, and humanized variants thereof

[0340] In some embodiments, each of the light chain variable regions disclosed in listed in TABLES D1-D6, or selected from 1A7, 3A2, 3B 10, 6G12, 6H6, 7A9, 7B3, 8A1, 8E10, 8F11, 8F8, 9F5, 9F5v2, 9G1, 9G3, 10A9, 10C1, 11A8, 12E2, 12F9, 12G6, 2C7, 2F5, 3C1, 4D7, 4D11, 6C11, 6G12, 7A3, 7C5, 7E9, 7F6, 7G1, 7H1, 8C3, 8F10, 12A1, 1E9, 2C5, 3C5, 4C12, 4F2, 5A2, 6B3, 7D1, 7D9, 11D8, 8A12, 10E7, 10B 11, 10D2, 7D5, 2A7, 3G12, 6H9, 8G9, 9B4, 10A1, 11A8, 12F3, 2F8, 10E3, 1H7, 2F6, 2H8, 3A7, 7E5, 7E5v2, 7F8, 11H5, 7C5, 4F11, 12D9,1B4v1, 1B4V2, 6H2, 7B11v1, 7B 11v2, 18D8, 18E4v1, 18E4v2, 29F6v1, 29F6v2, 40D5v1, 40D5v2, 43B9, 44A8v1, 44A8v2, 44B4v1, and 44B4v2; and/or each of the heavy chain variable region of any one of the antibodies listed in TABLES D1-D6, or selected from 1A7, 3A2, 3B 10, 6G12, 6H6, 7A9, 7B3, 8A1, 8E10, 8F11, 8F8, 9F5, 9G1, 9G3, 10A9, 10C1, 11A8, 12E2, 12F9, 12G6, 2C7, 2F5, 3C1, 4D7, 4D11, 6C11, 6G12, 7A3, 7C5, 7E9, 7F6, 7G1, 7H1, 8C3, 8F10, 12A1, 1E9, 2C5, 3C5, 4C12, 4F2, 5A2, 6B3, 7D1, 7D9, 11D8, 8A12, 10E7, 10B 11, 10D2, 7D5, 2A7, 3G12, 6H9, 8G9, 9B4, 10A1, 11A8, 12F3, 2F8, 10E3, 1H7, 2F6, 2H8, 3A7, 7E5, 7F8, 11H5, 7C5, 4F11, 12D9,1B4v1, 1B4V2, 6H2, 7B11v1, 7B 11v2, 18D8, 18E4v1, 18E4v2, 29F6v1, 29F6v2, 40D5v1, 40D5v2, 43B9, 44A8v1, 44A8v2, 44B4v1, and 44B4v2 may be attached to the light chain constant regions (TABLE EN1) and heavy chain constant regions (TABLE EN2) to form complete antibody light and heavy chains, respectively, as further discussed below. Further, each of the generated heavy and light chain sequences may be combined to form a complete antibody structure. It should be understood that the heavy chain and light chain variable regions provided herein can also be attached to other constant domains having different sequences than the exemplary sequences listed herein.

[0341] E. PCT Patent Application Publication No. WO2019/028292A1

[0342] In some embodiments, the TREM2 agonist is an antibody, or antigen binding fragment thereof, as described in PCT Patent Application Publication No. WO2019/028292A1 (“the '292 application”), which is incorporated by reference herein, in its entirety.

[0343] In some embodiments, the TREM2 binding agent comprises an antibody that comprises a light chain variable domain comprising a CDRL1, CDRL2, and CDRL3 (also referred to as HVR-L1, HVR-L2, and HVR-L3, respectively), and a heavy chain variable domain comprising a CDRH1, CDRH2, and CDRH3 (also referred to as HVR-H1, HVR-H2, and HVR-H3, respectively) disclosed in the '573 application specification. In some embodiments, the TREM2 binding agent comprises an antibody that comprises a light chain variable domain and a heavy chain variable domain disclosed in the '573 application specification.

[0344] In some embodiments, anti-TREM2 antibodies of the present disclosure bind both human and cynomolgus monkey TREM2 with an affinity that is at least about 1-fold higher than an anti-TREM2 antibody selected from anti-TREM2 antibody comprising a heavy chain variable region comprising the amino acid sequence of SEQ ID NO:1734 and a light chain variable region comprising the amino acid sequence of SEQ ID NO:1763 (e.g., antibody AL2p-h50); an anti-TREM2 antibody comprising a heavy chain variable region comprising the amino acid sequence of SEQ ID NO:1798 and a light chain variable region comprising the amino acid sequence of SEQ ID NO:1810 (e.g., antibody AL2p-h77); and an anti-TREM2 antibody comprising a heavy chain variable region comprising the amino acid sequence of SEQ ID NO:1826 and a light chain variable region comprising the amino acid sequence of SEQ ID NO:1827 (e.g., antibody AL2). In some embodiments, anti-TREM2 antibodies of the present disclosure bind to primary human immune cells with an affinity that is at least about 10 times higher than that of an anti-TREM2 antibody selected from an anti-TREM2 antibody comprising a heavy chain variable region comprising the amino acid sequence of SEQ ID NO:1734 and a light chain variable region comprising the amino acid sequence of SEQ ID NO:1763; an anti-TREM2 antibody comprising a heavy chain variable region comprising the amino acid sequence of SEQ ID NO:1798 and a light chain variable region comprising the amino acid sequence of SEQ ID NO:1810; and an anti-TREM2 antibody comprising a heavy chain variable region comprising the amino acid sequence of SEQ ID NO:1826 and a light chain variable region comprising the amino acid sequence of SEQ ID NO:1827. In some embodiments, anti-TREM2 antibodies of the present disclosure cluster and activate TREM2 signaling in an amount that is at least about 1-fold greater than that of an anti-TREM2 antibody selected from an anti-TREM2 antibody comprising a heavy chain variable region comprising the amino acid sequence of SEQ ID NO:1734 and a light chain variable region comprising the amino acid sequence of SEQ ID NO:1763; an anti-TREM2 antibody comprising a heavy chain variable region comprising the amino acid sequence of SEQ ID NO:1798 and a light chain variable region comprising the amino acid sequence of SEQ ID NO:1810; and an anti-TREM2 antibody comprising a heavy chain variable region comprising the amino acid sequence of SEQ ID NO:1826 and a light chain variable region comprising the amino acid sequence of SEQ ID NO:1827. In some embodiments, anti-TREM2 antibodies of the present disclosure increase immune cell survival in vitro that to an extent that is greater than an anti-TREM2 antibody selected from an anti-TREM2 antibody comprising a heavy chain variable region comprising the amino acid sequence of SEQ ID NO:1734 and a light chain variable region comprising the amino acid sequence of SEQ ID NO:1763; an anti-TREM2 antibody comprising a heavy chain variable region comprising the amino acid sequence of SEQ ID NO:1798 and a light chain variable region comprising the amino acid sequence of SEQ ID NO:1810; and an anti-TREM2 antibody comprising a heavy chain variable region comprising the amino acid sequence of SEQ ID NO:1826 and a light chain variable region comprising the amino acid sequence of SEQ ID NO:1827. In some embodiments, anti-TREM2 antibodies of the present disclosure may also have improved in vivo half-lives. In some embodiments, anti-TREM2 antibodies of the present disclosure may also decreases plasma levels of soluble TREM2 in vivo. In some embodiments, anti-TREM2 antibodies of the present disclosure may also decrease soluble TREM2. In some embodiments, the soluble TREM2 is decreased about any of 10, 20, 30, 40, 50 or 60%.

[0345] In some embodiments, the antibody binds to a TREM2 protein, wherein the antibody comprises a heavy chain variable region and a light chain variable region, wherein the heavy chain variable region comprises: an HVR-H1 comprising the sequence according to Formula I: YAFX₁X₂X₃WMN, wherein X₁ is S or W, X2 is S, L, or R. and X₃ is S, D, H, Q, or E (SEQ ID NO:1828); an HVR-H2 comprising the sequence according to Formula II: RIYPGX₁GX₂TNYAX₃KX₄X₅G, wherein X₁ is D, G, E, Q, or V, X₂ is D or Q, X₃ is Q, R, H, W, Y, or G, X₄ is F, R, or W, and X₅ is Q, R, K, or H (SEQ ID NO:1829); and an HVR-H3 comprising the sequence according to Formula III: ARLLRNX₁PGX₂SYAX₃DY, wherein X, is Q or K, X₂ is E, S, or A, and X₃ is M or H (SEQ ID NO:1830), and wherein the antibody is not an antibody comprising a heavy chain variable region comprising an HVR-H1 comprising the sequence of YAFSSSWMN (SEQ ID NO:1831), an HVR-H2 comprising the sequence of RIYPGDGDTNYAQKFQG (SEQ ID NO:1832), and an HVR-H3 comprising the sequence of ARLLRNQPGESYAMDY (SEQ ID NO:1833). In some embodiments, the TREM2 agonist is an antibody that binds to a TREM2 protein, wherein the antibody comprises a heavy chain variable region and a light chain variable region, wherein the light chain variable region comprises: an HVR-L1 comprising the sequence according to Formula W: RX₁SX₂SLX₃HSNX₄YTYLH, wherein X₁ is S or T, X₂ is Q, R, or S, X₃ is V or I, and. X₄ is G, R, W, Q, or A (SEQ ID NO:1834); an HVR-L2 comprising the sequence according to Formula V: KVSNRX₁S, wherein X) is F, R, V, or K (SEQ ID NO:1835); and an HVR-L3 comprising the sequence according to Formula V: SQSTRVPYT (SEQ ID NO:1836), and wherein the antibody is not an antibody comprising a light chain variable region comprising an HVR-L1 comprising the sequence of RSSQSLVHSNGYTYLH (SEQ ID NO:1837), an HVR-L2 comprising the sequence of KVSNRFS (SEQ ID NO:1838), and an HVR-L3 comprising the sequence of SQSTRVPYT (SEQ ID NO:1836). In some embodiments, the antibody comprises a heavy chain variable region and a light chain variable region, wherein the heavy chain variable region comprises: an HVR-H1 comprising the sequence according to Formula I: YAFX₁X₂X₃WMN, wherein X₁ is S or W, X2 is S, L, or R, and X₃ is S, D, H, Q, or E (SEQ ID NO:1828); an HVR-H2 comprising the sequence according to Formula II: RIYPGX₁GX₂TNYAX₃KX₄X₅G, wherein X₁ is D, G, E, Q, or V, X₂ is D or Q, X₃ is Q, R, H, W, Y, or G, X₄ is F, R, or W, and X₅ is Q, R, K, or H (SEQ ID NO:1829); and an HVR-H3 comprising the sequence according to Formula III: ARLLRNX₁PGX₂SYAX₃DY, wherein X₁ is Q or K, X₂ is E, S, or A, and X₃ is M or H (SEQ ID NO:1830), and the light chain variable region comprises: an HVR-L1 comprising the sequence according to Formula IV: RX₁SX₂SLX₃HSNX₄YTYLH, wherein X, is S or T, X₂ is Q, R, or S, X₃ is V or I, and X₄ is G, R, W, Q, or A (SEQ ID NO:1834); an HVR-L2 comprising the sequence according to Formula V: KVSNRX₁S, wherein X₁ is F, R, V, or K (SEQ ID NO:1835); and an HVR-L3 comprising the sequence: SQSTRVPYT (SEQ ID NO:1836), and wherein the antibody is not an antibody comprising a heavy chain variable region comprising an HVR-H1 comprising the sequence of YAFSSSWMN (SEQ ID NO:1831), an HVR-H2 comprising the sequence of RIYPGDGDTNYAQKFQG (SEQ ID NO:1832), and an HVR-H3 comprising the sequence of ARLLRNQPGESYAMDY (SEQ ID NO:1833), and comprising a light chain variable region comprising an HVR-L1 comprising the sequence of RSSQSLVHSNGYTYLH (SEQ ID NO:1837), an HVR-L2 comprising the sequence of KVSNRFS (SEQ ID NO:1838), and an HVR-L3 comprising the sequence of SQSTRVPYT (SEQ ID NO:1836).

[0346] In some embodiments, the antibody binds to a TREM2 protein, wherein the antibody comprises a heavy chain variable region and a light chain variable region, wherein the heavy chain variable region comprises: an HVR-H1 comprising a sequence selected from the group consisting of SEQ ID NOS:1839 and 1843; an HVR-H2 comprising a sequence selected from the group consisting of SEQ ID NOS:1840, 1842, 1844, and 1848; and an HVR-H3 comprising a sequence selected from the group consisting of SEQ ID NOS:1833 and 1845; and/or the light the light chain variable region comprises: an HVR-L1 comprising a sequence selected from the group consisting of 1837, 1846, 1849, and 1851; an HVR-L2 comprising a sequence selected from the group consisting of SEQ ID NOS:1838, 1841, and 1847; and an HVR-L3 comprising the sequence of SEQ ID NO:1836. In some embodiments, the antibody comprises a heavy chain variable region and a light chain variable region, wherein the heavy chain variable region comprises: an HVR-H1 comprising the sequence of SEQ ID NO:1839; an HVR-H2 comprising a sequence selected from the group consisting of SEQ ID NOS:1840, 1842, and 1848; and an HVR-H3 comprising the sequence of SEQ ID NO:1833; and/or the light the light chain variable region comprises: an HVR-L1 comprising a sequence selected from the group consisting of 1837, 1849, and 1851; an HVR-L2 comprising a sequence selected from the group consisting of SEQ ID NOS:1838 and 1841; and an HVR-L3 comprising the sequence of SEQ ID NO:1836.

[0347] In some embodiments, the antibody binds to a TREM2 protein, wherein the antibody comprises a heavy chain variable region and a light chain variable region, wherein the heavy chain variable region comprises the HVR-H1, HVR-H2, and HVR-H3 of antibody AL2p-2, AL2p-3, AL2p-4, AL2p-7, AL2p-8, AL2p-9, AL2p-10, AL2p-11, AL2p-12, AL2p-13, AL2p-14, AL2p-15, AL2p-16, AL2p-17, AL2p-18, AL2p-19, AL2p-20, AL2p-21, AL2p-22, AL2p-23, AL2p-24, AL2p-25, AL2p-26, AL2p-27, AL2p-28, AL2p-29, AL2p-30, AL2p-31, AL2p-32, AL2p-35, AL2p-36, AL2p-37, AL2p-38, AL2p-39, AL2p-40, AL2p-41, AL2p-42, AL2p-43, AL2p-44, AL2p-45, AL2p-46, AL2p-47, AL2p-48, AL2p-49, AL2p-50, AL2p-51, AL2p-52, AL2p-53, AL2p-54, AL2p-55, AL2p-56. AL2p-57, AL2p-58. AL2p-59, AL2p-60. AL2p-61, or AL2p-62 (as shown in TABLES E1-E3). In some embodiments, the antibody comprises a heavy chain variable region and a light chain variable region, wherein the light chain variable region comprises the HVR-L1, HVR-L2, and HVR-L3 of antibody AL2p-5, AL2p-6, AL2p-7, AL2p-8, AL2p-9, AL2p-10, AL2p-11, AL2p-12, AL2p-13, AL2p-14, AL2p-15, AL2p-16, AL2p-17, AL2p-18, AL2p-19, AL2p-20, AL2p-21, AL2p-22, AL2p-23, AL2p-24, AL2p-25, AL2p-26, AL2p-27, AL2p-28, AL2p-29, AL2p-30, AL2p-31, AL2p-32, AL2p-33, AL2p-38, AL2p-39, AL2p-40, AL2p-41, AL2p-42, AL2p-43, AL2p-44, AL2p-45, AL2p-46, AL2p-47, AL2p-48, AL2p-49, AL2p-50, AL2p-51, AL2p-52, AL2p-53, AL2p-54, AL2p-55, AL2p-56, AL2p-57, AL2p-58, AL2p-59, AL2p-60, AL2p-61, or AL2p-62 (as shown in TABLES E4-E6). In some embodiments, the antibody comprises a heavy chain variable region and a light chain variable region, wherein the heavy chain variable region comprises the HVR-H I, HVR-H2, and HVR-H3 of antibody AL2p-2, AL2p-3, AL2p-4, AL2p-7, AL2p-8, AL2p-9, AL2p-10, AL2p-11, AL2p-12, AL2p-13, AL2p-14, AL2p-15, AL2p-16, AL2p-17, AL2p-18, AL2p-19, AL2p-20, AL2p-21, AL2p-22, AL2p-23, AL2p-24, AL2p-25, AL2p-26, AL2p-27, AL2p-28, AL2p-29, AL2p-30, AL2p-31, AL2p-32, AL2p-35, AL2p-36, AL2p-37, AL2p-38, AL2p-39, AL2p-40, AL2p-41, AL2p-42, AL2p-43, AL2p-44, AL2p-45, AL2p-46, AL2p-47, AL2p-48, AL2p-49, AL2p-50, AL2p-51, AL2p-52, AL2p-53, AL2p-54, AL2p-55, AL2p-56, AL2p-57, AL2p-58, AL2p-59, AL2p-60, AL2p-61, or AL2p-62 (as shown in TABLES E1-E3); and the light chain variable region comprises the HVR-L1. HVR-L2, and HVR-L3 of antibody AL2p-5, AL2p-6, AL2p-7, AL2p-8, AL2p-9, AL2p-10, AL2p-11, AL2p-12, AL2p-13, AL2p-14, AL2p-15, AL2p-16, AL2p-17, AL2p-18, AL2p-19, AL2p-20, AL2p-21, AL2p-22. AL2p-23, AL2p-24, AL2p-25, AL2p-26, AL2p-27, AL2p-28, AL2p-29, AL2p-30, AL2p-31, AL2p-32, AL2p-33, AL2p-38, AL2p-39, AL2p-40, AL2p-41, AL2p-42, AL2p-43, AL2p-44, AL2p-45 AL2p-46, AL2p-47, AL2p-48, AL2p-49, AL2p-50, AL2p-5I, AL2p-52, AL2p-53, AL2p-54, AL2p-55, AL2p-56, AL2p-57, AL2p-58, AL2p-59, AL2p-60, AL2p-61, or AL2p-62 (as shown in TABLES E4-E6). In some embodiments, the antibody comprises a heavy chain variable region comprising an HVR-H1, HVR-H2, and HVR-H3 and a light chain variable region comprising an HVR-L1, HVR-L2, and HVR-L3, wherein the antibody comprises the HVR-H1, HVR-H2, HVR-H3, HVR-L1, HVR-L2. and HVR-L3 of antibody AL2p-2, AL2p-3, AL2p-4, AL2p-5, AL2p-6, AL2p-7, AL2p-8, AL2p-9, AL2p-10, AL2p-11, AL2p-12, AL2p-13, AL2p-14, AL2p-15, AL2p-16, AL2p-17, AL2p-18, AL2p-19, AL2p-20, AL2p-21, AL2p-22, AL2p-23, AL2p-24, AL2p-25, AL2p-26, AL2p-27, AL2p-28, AL2p-29, AL2p-30, AL2p-31, AL2p-32, AL2p-33, AL2p-35, AL2p-36, AL2p-37, AL2p-38, AL2p-39, AL2p-40, AL2p-41, AL2p-42, AL2p-43. AL2p-44, AL2p-45, AL2p-46, AL2p-47, AL2p-48, AL2p-49, AL2p-50, AL2p-51, AL2p-52, AL2p-53, AL2p-54, AL2p-55, AL2p-56, AL2p-57, AL2p-58, AL2p-59, AL2p-60, AL2p-61, or AL2p-62 (as shown in TABLES E1-E3 and TABLES E4-E6).

[0348] In some embodiments, the heavy chain variable region comprises one, two, three or four frame work regions selected from VH FRI, VH FR2, VH FR3, and VH FR4, wherein: the VH FRI comprises a sequence selected from the group consisting of SEQ ID NOS:1716-1718, the VH FR2 comprises a sequence selected from the group consisting of SEQ ID NOS:1719 and 1720, the VH FR3 comprises a sequence selected from the group consisting of SEQ ID NOS:1721 and 1722, and the VH FR4 comprises the sequence of SEQ ID NO:1723; and/or the light chain variable region comprises one, two, three or four frame work regions selected from VL FRI. VL FR2, VL FR3, and VL FR4, wherein: the VL FRI comprises a sequence selected from the group consisting of SEQ ID NOS:1724-1727, the VL FR2 comprises a sequence selected from the group consisting of SEQ ID NOS:1728 and 1729, the VL FR3 comprises a sequence selected from the group consisting of SEQ ID NOS:1730 and 1731, and the VL FR4 comprises a sequence selected from the group consisting of SEQ ID NOS:1732 and 1733. In some embodiments, the antibody comprises a heavy chain variable region comprising an amino acid sequence selected from the group consisting of SEQ ID NOS:1734-1777 and 1798; and/or a light chain variable region comprising an amino acid sequence selected from the group consisting of SEQ ID NOS:1799-1820 and 1825. In some embodiments, the antibody comprises the heavy chain variable region of antibody AL2p-h50, AL2p-2. AL2p-3, AL2p-4, AL2p-5, AL2p-6. AL2p-7, AL2p-8, AL2p-9, AL2p-10, AL2p-11, AL2p-12, AL2p-13, AL2p-14, AL2p-15, AL2p-16, AL2p-17, AL2p-18, AL2p-19, AL2p-20, AL2p-21, AL2p-22, AL2p-23, AL2p-24, AL2p-25, AL2p-26, AL2p-27, AL2p-28, AL2p-29, AL2p-30, AL2p-31, AL2p-32, AL2p-33, AL2p-h77, AL2p-35, AL2p-36, AL2p-37, AL2p-38, AL2p-39, AL2p-40, AL2p-41, AL2p-42, AL2p-43, AL2p-44, AL2p-45, AL2p-46, AL2p-47, AL2p-48, AL2p-49, AL2p-50, AL2p-51, AL2p-52, AL2p-53, AL2p-54, AL2p-55, AL2p-56, AL2p-57, AL2p-58, AL2p-59, AL2p-60, AL2p-61, or AL2p-62 (as shown in TABLE E15); and/or the antibody comprises the light chain variable region of antibody AL2p-h50, AL2p-2, AL2p-3. AL2p-4, AL2p-5, AL2p-6, AL2p-7. AL2p-8. AL2p-9, AL2p-10, AL2p-11, AL2p-12, AL2p-13, AL2p-14, AL2p-15, AL2p-16, AL2p-17, AL2p-18, AL2p-19, AL2p-20, AL2p-21, AL2p-22, AL2p-23, AL2p-24, AL2p-25, AL2p-26, AL2p-27, AL2p-28, AL2p-29, AL2p-30, AL2p-31, AL2p-32, AL2p-33, AL2p-h77, AL2p-35, AL2p-36, AL2p-37, AL2p-38, AL2p-39, AL2p-40, AL2p-41, AL2p-42, AL2p-43, AL2p-44, AL2p-45, AL2p-46, AL2p-47, AL2p-48, AL2p-49, AL2p-50, AL2p-51, AL2p-52, AL2p-53, AL2p-54, AL2p-55, AL2p-56, AL2p-57, AL2p-58, AL2p-59, AL2p-60, AL2p-61, or AL2p-62 (as shown in TABLE E17). In some embodiments: (a) the HVR-H1 comprises the amino acid sequence YAFSSQWMN (SEQ ID NO:1839), the HVR-H2 comprises the amino acid sequence RIYPGGGDTNYARKFQG (SEQ ID NO:1840), the HVR-H3 comprises the amino acid sequence ARLLRNQPGESYAMDY (SEQ ID NO:1833), the HVR-L1 comprises the amino acid sequence RSSQSLVHSNGYTYLH (SEQ ID NO:1837), the HVR-L2 comprises the amino acid sequence KVSNRRS (SEQ ID NO:1841), and the HVR-L3 comprises the amino acid sequence SQSTRVPYT (SEQ ID NO:1836); (b) the HVR-H1 comprises the amino acid sequence YAFSSQWMN (SEQ ID NO:1839), the HVR-H2 comprises the amino acid sequence RIYPGGGDTNYAGKFQG (SEQ ID NO:1842), the HVR-H3 comprises the amino acid sequence ARLLRNQPGESYAMDY (SEQ ID NO:1833), the HVR-L1 comprises the amino acid sequence RSSQSLVHSNGYTYLH (SEQ ID NO:1837), the HVR-L2 comprises the amino acid sequence KVSNRFS (SEQ ID NO:1838), and the HVR-L3 comprises the amino acid sequence SQSTRVPYT (SEQ ID NO:1836); (c) the HVR-H1 comprises the amino acid sequence YAFSSDWMN (SEQ ID NO:1843), the HVR-H2 comprises the amino acid sequence RIYPGEGDTNYARKFHG (SEQ ID NO:1844) the HVR-H3 comprises the amino acid sequence ARLLRNKPGESYAMDY (SEQ ID NO:1845) the HVR-L1 comprises the amino acid sequence RTSQSLVHSNAYTYLH (SEQ ID NO:1846), the HVR-L2 comprises the amino acid sequence KVSNRVS (SEQ ID NO:1847). and the HVR-L3 comprises the amino acid sequence SQSTRVPYT (SEQ ID NO:1836); (d) the HVR-H1 comprises the amino acid sequence YAFSSQWMN (SEQ ID NO:1839), the HVR-H2 comprises the amino acid sequence RIYPGEGDTNYARKFQG (SEQ ID NO:1848), the HVR-H3 comprises the amino acid sequence ARLLRNQPGESYAMDY (SEQ ID NO:1833), the HVR-L1 comprises the amino acid sequence RSSQSLVHSNQYTYLH (SEQ ID NO:1849), the HVR-L2 comprises the amino acid sequence KVSNRRS (SEQ ID NO:1841), and the HVR-L3 comprises the amino acid sequence SQSTRVPYT (SEQ ID NO:1836); (e) the HVR-H1 comprises the amino acid sequence YAFSSQWMN (SEQ ID NO:1839). the HVR-H2 comprises the amino acid sequence RIYPGEGDTNYAGKFQG (SEQ ID NO:1850). the HVR-H3 comprises the amino acid sequence ARLLRNQPGESYAMDY (SEQ ID NO:1833), the HVR-L1 comprises the amino acid sequence RSSQSLVHSNQYTYLH (SEQ ID NO:1849), the HVR-L2 comprises the amino acid sequence KVSNRFS (SEQ ID NO:1838), and the HVR-L3 comprises the amino acid sequence SQSTRVPYT (SEQ ID NO:1836); (f) the HVR-H1 comprises the amino acid sequence YAFSSQWMN (SEQ ID NO:1839), the HVR-H2 comprises the amino acid sequence RIYPGGGDTNYAGKFQG (SEQ ID NO:1842). the HVR-H3 comprises the amino acid sequence ARLLRNQPGESYAMDY (SEQ ID NO:1833), the HVR-L1 comprises the amino acid sequence RSSQSLVHSNRYTYLH (SEQ ID NO:1851), the HVR-L2 comprises the amino acid sequence KVSNRFS (SEQ ID NO:1838), and the HVR-L3 comprises the amino acid sequence SQSTRVPYT (SEQ ID NO:1836); or (g) the HVR-H1 comprises the amino acid sequence YAFSSQWMN (SEQ ID NO:1839), the HVR-H2 comprises the amino acid sequence RIYPGGGDTNYARKFQG (SEQ ID NO:1840), the HVR-H3 comprises the amino acid sequence ARLLRNQPGESYAMDY (SEQ ID NO:1833), the HVR-L1 comprises the amino acid sequence RSSQSLVHSNRYTYLH (SEQ ID NO:1851). the HVR-L2 comprises the amino acid sequence KVSNRRS (SEQ ID NO:1841), and the HVR-L3 comprises the amino acid sequence SQSTRVPYT (SEQ ID NO:1836). In some embodiments, the HVR-H1 comprises the amino acid sequence YAFSSQWMN (SEQ ID NO:1839), the HVR-H2 comprises the amino acid sequence RIYPGGGDTNYARKFQG (SEQ ID NO:1840), the HVR-H3 comprises the amino acid sequence ARLLRNQPGESYAMDY (SEQ ID NO:1833), the HVR-L1 comprises the amino acid sequence RSSQSLVHSNGYTYLH (SEQ ID NO:1837), the HVR-L2 comprises the amino acid sequence KVSNRRS (SEQ ID NO:1841), and the HVR-L3 comprises the amino acid sequence SQSTRVPYT (SEQ ID NO:1836). In some embodiments, the HVR-H1 comprises the amino acid sequence YAFSSQWMN (SEQ ID NO:1839), the HVR-H2 comprises the amino acid sequence RIYPGGGDTNYAGKFQG (SEQ ID NO:1842), the HVR-H3 comprises the amino acid sequence ARLLRNQPGESYAMDY (SEQ ID NO:1833), the HVR-L1 comprises the amino acid sequence RSSQSLVHSNGYTYLH (SEQ ID NO:1837), the HVR-L2 comprises the amino acid sequence KVSNRFS (SEQ ID NO:1838), and the HVR-L3 comprises the amino acid sequence SQSTRVPYT (SEQ ID NO:1836). In some embodiments, the HVR-H1 comprises the amino acid sequence YAFSSDWMN (SEQ ID NO:1843), the HVR-H2 comprises the amino acid sequence RIYPGEGDTNYARKFHG (SEQ ID NO:1844), the HVR-H3 comprises the amino acid sequence ARLLRNKPGESYAMDY (SEQ ID NO:1845), the HVR-L1 comprises the amino acid sequence RTSQSLVHSNAYTYLH (SEQ ID NO:1846), the HVR-L2 comprises the amino acid sequence KVSNRVS (SEQ ID NO:1847), and the HVR-L3 comprises the amino acid sequence SQSTRVPYT (SEQ ID NO:1836). In some embodiments, the HVR-H1 comprises the amino acid sequence YAFSSQWMN (SEQ ID NO:1839). the HVR-H2 comprises the amino acid sequence RIYPGEGDTNYARKFQG (SEQ ID NO:1848), the HVR-H3 comprises the amino acid sequence ARLLRNQPGESYAMDY (SEQ ID NO:1833), the HVR-L1 comprises the amino acid sequence RSSQSLVHSNQYTYLH (SEQ ID NO:1849), the HVR-L2 comprises the amino acid sequence KVSNRRS (SEQ ID NO:1841), and the HVR-L3 comprises the amino acid sequence SQSTRVPYT (SEQ ID NO:1836). In some embodiments, the HVR-H1 comprises the amino acid sequence YAFSSQWMN (SEQ ID NO:1839), the HVR-H2 comprises the amino acid sequence RIYPGEGDTNYAGKFQG (SEQ ID NO:1850), the HVR-H3 comprises the amino acid sequence ARLLRNQPGESYAMDY (SEQ ID NO:1833), the HVR-L1 comprises the amino acid sequence RSSQSLVHSNQYTYLH (SEQ ID NO:1849), the HVR-L2 comprises the amino acid sequence KVSNRFS (SEQ ID NO:1838), and the HVR-L3 comprises the amino acid sequence SQSTRVPYT (SEQ ID NO:1836). In some embodiments, the HVR-H1 comprises the amino acid sequence YAFSSQWMN (SEQ ID NO:1839), the HVR-H2 comprises the amino acid sequence RIYPGGGDTNYAGKFQG (SEQ ID NO:1842), the HVR-H3 comprises the amino acid sequence ARLLRNQPGESYAMDY (SEQ ID NO:1833), the HVR-L1 comprises the amino acid sequence RSSQSLVHSNRYTYLH (SEQ ID NO:1851), the HVR-L2 comprises the amino acid sequence KVSNRFS (SEQ ID NO:1838), and the HVR-L3 comprises the amino acid sequence SQSTRVPYT (SEQ ID NO:1836). In some embodiments, the HVR-HI comprises the amino acid sequence YAFSSQWMN (SEQ ID NO:1839), the HVR-H2 comprises the amino acid sequence RIYPGGGDTNYARKFQG (SEQ ID NO:1840), the HVR-H3 comprises the amino acid sequence ARLLRNQPGESYAMDY (SEQ ID NO:1833), the HVR-L1 comprises the amino acid sequence RSSQSLVHSNRYTYLH (SEQ ID NO:1851), the HVR-L2 comprises the amino acid sequence KVSNRRS (SEQ ID NO:1841), and the HVR-L3 comprises the amino acid sequence SQSTRVPYT (SEQ ID NO:1836). In some embodiments, the HVR-H1 comprises the amino acid sequence YAFSSQWMN (SEQ ID NO:1839), the HVR-H2 comprises the amino acid sequence RIYPGGGDTNYAGKFQG (SEQ ID NO:1842), the HVR-H3 comprises the amino acid sequence ARLLRNQPGESYAMDY (SEQ ID NO:1833), the HVR-L1 comprises the amino acid sequence RSSQSLVHSNRYTYLH (SEQ ID NO:1851), the HVR-L2 comprises the amino acid sequence KVSNRFS (SEQ ID NO:1838), and the HVR-L3 comprises the amino acid sequence SQSTRVPYT (SEQ ID NO:1836).

[0349] In some embodiments, the antibody comprises a heavy chain variable region and a light chain variable region, wherein the heavy chain variable region comprises Kabat CDRs; and/or the light chain variable region comprises Kabat CDRs. In some embodiments, the heavy chain variable region comprises a CDR-H1 comprising the sequence of SQWMN (SEQ ID NO:1901), a CDR-H2 comprising the sequence of RIYPGGGDTNYAGKFQG (SEQ ID NO:1842); and a CDR-H3 comprising the sequence of LLRNQPGESYAMDY (SEQ ID NO:1902). In some embodiments, the light chain variable region comprises a CDR-L1 comprising the sequence of RSSQSLVHSNGYTYLH (SEQ ID NO:1837), a CDR-L2 comprising the sequence of KVSNRFS (SEQ ID NO:1838); and a CDR-L3 comprising the sequence of SQSTRVPYT (SEQ ID NO:1836). In some embodiments, the heavy chain variable region comprises a CDR-HI comprising the sequence of SQWMN (SEQ ID NO:1901), a CDR-H2 comprising the sequence of RIYPGGGDTNYAGKFQG (SEQ ID NO:1842); and a CDR-H3 comprising the sequence of LLRNQPGESYAMDY (SEQ ID NO:1902); and the light chain variable region comprises a CDR-L1 comprising the sequence of RSSQSLVHSNGYTYLH (SEQ ID NO:1837), a CDR-L2 comprising the sequence of KVSNRFS (SEQ ID NO:1838); and a CDR-L3 comprising the sequence of SQSTRVPYT (SEQ ID NO:1836).

[0350] In some embodiments, the antibody comprises a heavy chain variable region and a light chain variable region, wherein the heavy chain variable region comprises Kabat CDRs; and/or the light chain variable region comprises Kabat CDRs. In some embodiments, the heavy chain variable region comprises a CDR-H1 comprising the sequence of SDWMN (SEQ ID NO:1903), a CDR-H2 comprising the sequence of RIYPGEGDTNYARKFHG (SEQ ID NO:1844); and a CDR-H3 comprising the sequence of LLRNKPGESYAMDY (SEQ ID NO:1904). In some embodiments, the light chain variable region comprises a CDR-L1 comprising the sequence of RTSQSLVHSNAYTYLH (SEQ ID NO:1846), a CDR-L2 comprising the sequence of KVSNRVS (SEQ ID NO:1847); and a CDR-L3 comprising the sequence of SQSTRVPYT (SEQ ID NO:1836). In some embodiments, the heavy chain variable region comprises a CDR-HI comprising the sequence of SDWMN (SEQ ID NO:1903), a CDR-H2 comprising the sequence of RIYPGEGDTNYARKFHG (SEQ ID NO:1844); and a CDR-H3 comprising the sequence of LLRNKPGESYAMDY (SEQ ID NO:1904); and the light chain variable region comprises a CDR-LI comprising the sequence of RTSQSLVHSNAYTYLH (SEQ ID NO:1846), a CDR-L2 comprising the sequence of KVSNRVS (SEQ ID NO:1847); and a CDR-L3 comprising the sequence of SQSTRVPYT (SEQ ID NO:1836).

[0351] In some embodiments, the antibody comprises a heavy chain variable region and a light chain variable region, wherein the heavy chain variable region comprises Kabat CDRs; and/or the light chain variable region comprises Kabat CDRs. In some embodiments, the heavy chain variable region comprises a CDR-H1 comprising the sequence of SQWMN (SEQ ID NO:1901), a CDR-H2 comprising the sequence of RIYPGGGDTNYAGKFQG (SEQ ID NO:1842); and a CDR-H3 comprising the sequence of LLRNQPGESYAMDY (SEQ ID NO:1902). In some embodiments, the light chain variable region comprises a CDR-L1 comprising the sequence of RSSQSLVHSNRYTYLH (SEQ ID NO:1851), a CDR-L2 comprising the sequence of KVSNRFS (SEQ ID NO:1838)1 and a CDR-L3 comprising the sequence of SQSTRVPYT (SEQ ID NO:1836). In some embodiments, the heavy chain variable region comprises a CDR-H1 comprising the sequence of SQWMN (SEQ ID NO:1901), a CDR-H2 comprising the sequence of RIYPGGGDTNYAGKFQG (SEQ ID NO:1842); and a Kabat CDR-H3 comprising the sequence of LLRNQPGESYAMDY (SEQ ID NO:1902); and the light chain variable region comprises a CDR-L1 comprising the sequence of RSSQSLVHSNRYTYLH (SEQ ID NO:1851), a CDR-L2 comprising the sequence of KVSNRFS (SEQ ID NO:1838); and a CDR-L3 comprising the sequence of SQSTRVPYT (SEQ ID NO:1836).

[0352] In some embodiments, the antibody comprises a heavy chain variable region and a light chain variable region, wherein the heavy chain variable region comprises Kabat CDRs; and/or the light chain variable region comprises Kabat CDRs. In some embodiments, the heavy chain variable region comprises a CDR-H1 comprising the sequence of SQWMN (SEQ ID NO:1901), a CDR-H2 comprising the sequence of RIYPGGGDTNYARKFQG (SEQ ID NO:1840); and a CDR-H3 comprising the sequence of LLRNQPGESYAMDY (SEQ ID NO:1902). In some embodiments, the light chain variable region comprises a CDR-L1 comprising the sequence of RSSQSLVHSNRYTYLH (SEQ ID NO:1851), a CDR-L2 comprising the sequence of KVSNRRS (SEQ ID NO:1841); and a CDR-L3 comprising the sequence of SQSTRVPYT (SEQ ID NO:1836). In some embodiments, the heavy chain variable region comprises a CDR-H1 comprising the sequence of SQWMN (SEQ ID NO:1901), a CDR-H2 comprising the sequence of RIYPGGGDTNYARKFQG (SEQ ID NO:1840); and a CDR-H3 comprising the sequence of LLRNQPGESYAMDY (SEQ ID NO:1902); and the light chain variable region comprises a CDR-L1 comprising the sequence of RSSQSLVHSNRYTYLH (SEQ ID NO:1851), a CDR-L2 comprising the sequence of KVSNRRS (SEQ ID NO:1841); and a CDR-L3 comprising the sequence of SQSTRVPYT (SEQ ID NO:1836).

[0353] In some embodiments, the antibody comprises a heavy chain variable region and a light chain variable region, wherein the heavy chain variable region comprises Kabat CDRs; and/or the light chain variable region comprises Kabat CDRs. In some embodiments, the heavy chain variable region comprises a CDR-H1 comprising the sequence of SQWMN (SEQ ID NO:1901), a CDR-H2 comprising the sequence of RIYPGEGDTNYARKFQG (SEQ ID NO:1848); and a CDR-H3 comprising the sequence of LLRNQPGESYAMDY (SEQ ID NO:1902). In some embodiments, the light chain variable region comprises a CDR-L1 comprising the sequence of RSSQSLVHSNQYTYLH (SEQ ID NO:1849), a CDR-L2 comprising the sequence of KVSNRRS (SEQ ID NO:1841); and a CDR-L3 comprising the sequence of SQSTRVPYT (SEQ ID NO:1836). In some embodiments, the heavy chain variable region comprises a CDR-H1 comprising the sequence of SQWMN (SEQ ID NO:1901), a CDR-H2 comprising the sequence of RIYPGEGDTNYARKFQG (SEQ ID NO:1848); and a CDR-H3 comprising the sequence of LLRNQPGESYAMDY (SEQ ID NO:1902); and the light chain variable region comprises a CDR-L1 comprising the sequence of RSSQSLVHSNQYTYLH (SEQ ID NO:1849), a CDR-L2 comprising the sequence of KVSNRRS (SEQ ID NO:1841); and a CDR-L3 comprising the sequence of SQSTRVPYT (SEQ ID NO:1836).

[0354] In some embodiments, the antibody comprises a heavy chain variable region comprising an amino acid sequence selected from the group consisting of SEQ ID NOS:1734-1778 and 1798; and/or a light chain variable region comprising an amino acid sequence selected from the group consisting of SEQ ID NOS:1799-1820 and 1825. In some embodiments, the antibody comprises the heavy chain variable region of antibody AL2p-h50, AL2p-2, AL2p-3, AL2p-4, AL2p-5, AL2p-6, AL2p-7, AL2p-8, AL2p-9, AL2p-I0, AL2p-11, AL2p-I2, AL2p-13, AL2p-14, AL2p-15, AL2p-16, AL2p-17, AL2p-18, AL2p-19, AL2p-20, AL2p-21, AL2p-22, AL2p-23, AL2p-24, AL2p-25, AL2p-26, AL2p-27, AL2p-28, AL2p-29, AL2p-30, AL2p-31, AL2p-32, AL2p-33, AL2p-h77, AL2p-35, AL2p-36, AL2p-37, AL2p-38, AL2p-39, AL2p-40, AL2p-41, AL2p-42, AL2p-43, AL2p-44, AL2p-45, AL2p-46, AL2p-47, AL2p-48, AL2p-49, AL2p-50, AL2p-51, AL2p-52, AL2p-53, AL2p-54, AL2p-55, AL2p-56, AL2p-57, AL2p-58, AL2p-59, AL2p-60, AL2p-61, or AL2p-62 (as shown in TABLE E15); and/or the antibody comprises the light chain variable region of antibody AL2p-h50, AL2p-2, AL2p-3, AL2p-4, AL2p-5, AL2p-6, AL2p-7, AL2p-8, AL2p-9, AL2p-10, AL2p-11, AL2p-12, AL2p-13, AL2p-14, AL2p-15, AL2p-16, AL2p-17, AL2p-18, AL2p-19, AL2p-20, AL2p-21, AL2p-22, AL2p-23, AL2p-24, AL2p-25, AL2p-26, AL2p-27, AL2p-28, AL2p-29, AL2p-30, AL2p-31, AL2p-32, AL2p-33, AL2p-h77, AL2p-35, AL2p-36, AL2p-37, AL2p-38, AL2p-39, AL2p-40, AL2p-41, AL2p-42, AL2p-43, AL2p-44, AL2p-45, AL2p-46, AL2p-47, AL2p-48, AL2p-49, AL2p-50, AL2p-51, AL2p-52, AL2p-53, AL2p-54, AL2p-55, AL2p-56, AL2p-57, AL2p-58, AL2p-59, AL2p-60, AL2p-61, or AL2p-62 (as shown in TABLE E17). In some embodiments: (a) the heavy chain variable region comprises the amino acid sequence of SEQ ID NO:1760, and/or the light chain variable region comprises the amino acid sequence of SEQ ID NO:1804; (b) the heavy chain variable region comprises the amino acid sequence of SEQ ID NO:1766; and/or the light chain variable region comprises the amino acid sequence of SEQ ID NO:1811; (c) the heavy chain variable region comprises the amino acid sequence of SEQ ID NO:1771; and/or the light chain variable region comprises the amino acid sequence of SEQ ID NO:1815; (d) the heavy chain variable region comprises the amino acid sequence of SEQ ID NO:1777; and/or the light chain variable region comprises the amino acid sequence of SEQ ID NO:1817; (e) the heavy chain variable region comprises the amino acid sequence of SEQ ID NO:1778; and/or the light chain variable region comprises the amino acid sequence of SEQ ID NO:1818; (f) the heavy chain variable region comprises the amino acid sequence of SEQ ID NO:1766; and/or the light chain variable region comprises the amino acid sequence of SEQ ID NO:1819; or (g) the heavy chain variable region comprises the amino acid sequence of SEQ ID NO:1760; and/or the light chain variable region comprises the amino acid sequence of SEQ ID NO:1820. In some embodiments, the antibody comprises an Fc region comprising an amino acid sequence selected from the group consisting of SEQ ID NOS:1853-1863. In some embodiments, the antibody comprises an Fe region comprising the amino acid sequence of SEQ ID NO:1853. In some embodiments, the antibody comprises an Fc region comprising the amino acid sequence of SEQ ID NO:1854. In some embodiments, the antibody comprises an Fc region comprising the amino acid sequence of SEQ ID NO:1855. In some embodiments, the antibody comprises an Fc region comprising the amino acid sequence of SEQ ID NO:1856. In some embodiments, the antibody comprises an Fc region comprising the amino acid sequence of SEQ ID NO:1857. In some embodiments, the antibody comprises an Fc region comprising the amino acid sequence of SEQ ID NO:1858. In some embodiments, the antibody comprises an Fc region comprising the amino acid sequence of SEQ ID NO:1859. In some embodiments, the antibody comprises an Fc region comprising the amino acid sequence of SEQ ID NO:1860. In some embodiments, the antibody comprises an Fc region comprising the amino acid sequence of SEQ ID NO:1861. In some embodiments, the antibody comprises an Fc region comprising the amino acid sequence of SEQ ID NO:1862. In some embodiments, the antibody comprises an Fc region comprising the amino acid sequence of SEQ ID NO:1863. In some embodiments, the antibody comprises a heavy chain comprising an amino acid sequence selected from the group consisting of SEQ ID NOS:1905-1920; and/or a light chain comprising an amino acid sequence selected from the group consisting of SEQ ID NOS:1921-1925. In some embodiments, the antibody comprises a heavy chain comprising an amino acid sequence selected from the group consisting of SEQ ID NOS:1905 and 1906; and a light chain comprising the amino acid sequence of SEQ ID NO:1921. In some embodiments, the antibody comprises a heavy chain comprising an amino acid sequence selected from the group consisting of SEQ ID NOS:1907 and 1908; and a light chain comprising the amino acid sequence of SEQ ID NO:1921. In some embodiments, the antibody comprises a heavy chain comprising an amino acid sequence selected from the group consisting of SEQ ID NOS:1909 and 1910; and a light chain comprising the amino acid sequence of SEQ ID NO:1922. In some embodiments, the antibody comprises a heavy chain comprising an amino acid sequence selected from the group consisting of SEQ ID NOS:1911 and 1912; and a light chain comprising the amino acid sequence of SEQ ID NO:1922. In some embodiments, the antibody comprises a heavy chain comprising an amino acid sequence selected from the group consisting of SEQ ID NOS:1913 and 1914; and a light chain comprising the amino acid sequence of SEQ ID NO:1923. In some embodiments, the antibody comprises a heavy chain comprising an amino acid sequence selected from the group consisting of SEQ ID NOS:1915 and 1916; and a light chain comprising the amino acid sequence of SEQ ID NO:1925. in some embodiments, the antibody comprises a heavy chain comprising an amino acid sequence selected from the group consisting of SEQ ID NOS:1917 and 1918; and a light chain comprising the amino acid sequence of SEQ ID NO:1925. In some embodiments, the antibody comprises a heavy chain comprising an amino acid sequence selected from the group consisting of SEQ ID NOS:1919 and 1920; and a light chain comprising the amino acid sequence of SEQ ID NO:1924.

[0355] In some embodiments, the heavy chain variable region comprises the amino acid sequence of SEQ ID NO:1760, and/or the light chain variable region comprises the amino acid sequence of SEQ ID NO:1804. In some embodiments, the heavy chain variable region comprises the amino acid sequence of SEQ ID NO:1766; and/or the light chain variable region comprises the amino acid sequence of SEQ ID NO:1811. In some embodiments, the heavy chain variable region comprises the amino acid sequence of SEQ ID NO:1771; and/or the light chain variable region comprises the amino acid sequence of SEQ ID NO:1815. In some embodiments, the heavy chain variable region comprises the amino acid sequence of SEQ ID NO:1777; and/or the light chain variable region comprises the amino acid sequence of SEQ ID NO:1817. In some embodiments, the heavy chain variable region comprises the amino acid sequence of SEQ ID NO:1778; and/or the light chain variable region comprises the amino acid sequence of SEQ ID NO:1718. In some embodiments, the heavy chain variable region comprises the amino acid sequence of SEQ ID NO:1766; and/or the light chain variable region comprises the amino acid sequence of SEQ ID NO:1819. In some embodiments, the heavy chain variable region comprises the amino acid sequence of SEQ ID NO:1760; and/or the light chain variable region comprises the amino acid sequence of SEQ ID NO:1820.

[0356] In some embodiments, the antibody comprises a heavy chain variable region comprising an amino acid sequence selected from the group consisting of SEQ ID NOS:1734, 1763 and 1779-1797; and/or a light chain variable region comprising an amino acid sequence selected from the group consisting of SEQ ID NOS:1799, 1811, and 1821-1824. In some embodiments, the antibody comprises the heavy chain variable region of antibody AL2p-h19, AL2p-h21, AL2p-h22, AL2p-h23, AL2p-h24, AL2p-h25, AL2p-h26, AL2p-h27, AL2p-h28, AL2p-h29, AL2p-h30, AL2p-h31, AL2p-h32, AL2p-h33, AL2p-h34, AL2p-1135, AL2p-h36, AL2p-h42, AL2p-h43, AL2p-h44, AL2p-h47, AL2p-h59, AL2p-h76, or AL2p-h90 (as shown in TABLE E15); and/or the antibody comprises the light chain variable region of antibody AL2p-h19, AL2p-h21, AL2p-h22, AL2p-h23, AL2p-h24, AL2p-h25, AL2p-h26, AL2p-h27, AL2p-h28, AL2p-h29, AL2p-h30, AL2p-h31, AL2p-h32, AL2p-h33, AL2p-h34, AL2p-h35, AL2p-h36, AL2p-h42, AL2p-h43, AL2p-h44, AL2p-h47, AL2p-h59, AL2p-h76, or AL2p-h90 (as shown in TABLE E17).

[0357] In some embodiments, the antibody comprises a heavy chain comprising an amino acid sequence selected from the group consisting of SEQ ID NOS:1905-1920; and/or a light chain comprising an amino acid sequence selected from the group consisting of SEQ ID NOS:1921-1925. In some embodiments, the antibody comprises a heavy chain comprising an amino acid sequence selected from the group consisting of SEQ ID NOS:1905 and 1906; and a light chain comprising the amino acid sequence of SEQ ID NO:1921. In some embodiments, the antibody comprises a heavy chain comprising an amino acid sequence selected from the group consisting of SEQ ID NOS:1907 and 1908; and a light chain comprising the amino acid sequence of SEQ ID NO:1921. In some embodiments, the antibody comprises a heavy chain comprising an amino acid sequence selected from the group consisting of SEQ ID NOS:1909 and 1910; and a light chain comprising the amino acid sequence of SEQ ID NO:1922. In some embodiments, the antibody comprises a heavy chain comprising an amino acid sequence selected from the group consisting of SEQ ID NOS:1911 and 1912; and a light chain comprising the amino acid sequence of SEQ ID NO:1922. In some embodiments, the antibody comprises a heavy chain comprising an amino acid sequence selected from the group consisting of SEQ ID NOS:1913 and 1914; and a light chain comprising the amino acid sequence of SEQ ID NO:1923. In some embodiments, the antibody comprises a heavy chain comprising an amino acid sequence selected from the group consisting of SEQ ID NOS:1915 and 1916; and a light chain comprising the amino acid sequence of SEQ ID NO:1925. In some embodiments, the antibody comprises a heavy chain comprising an amino acid sequence selected from the group consisting of SEQ ID NOS:1917 and 1918; and a light chain comprising the amino acid sequence of SEQ ID NO:1925. In some embodiments, the antibody comprises a heavy chain comprising an amino acid sequence selected from the group consisting of SEQ ID NOS:1919 and 1920; and a light chain comprising the amino acid sequence of SEQ ID NO:1924.

[0358] In some embodiments that may be combined with any of the preceding embodiments. the antibody is a bispecific antibody recognizing a first antigen and a second antigen, wherein the first antigen is human TREM2 or a naturally occurring variant thereof, and the second antigen is: (a) an antigen facilitating transport across the blood-brain-barrier; (b) an antigen facilitating transport across the blood-brain-barrier selected from the group consisting of transferrin receptor (TR), insulin receptor (HIR), insulin-like growth factor receptor (IGFR), low-density lipoprotein receptor related proteins 1 and 2 (LPR-1 and 2), diphtheria toxin receptor, CRM197, a llama single domain antibody, TMEM 30(A), a protein transduction domain, TAT, Syn-B, penetratin, a poly-arginine peptide, an angiopeptide, and ANG1005; (c) a disease-causing agent selected from the group consisting of disease-causing peptides or proteins or, disease-causing nucleic acids, wherein the disease-causing nucleic acids are antisense GGCCCC (G2C4) repeat-expansion RNA, the disease-causing proteins are selected from the group consisting of amyloid beta, oligomeric amyloid beta, amyloid beta plaques, amyloid precursor protein or fragments thereof, Tau, TAPP, alpha-synuclein, TDP-43, FUS protein, C9orf72 (chromosome 9 open reading frame 72), c9RAN protein, prion protein, PrPSc, huntingtin, calcitonin, superoxide dismutase, ataxin, ataxin 1, ataxin 2, ataxin 3, ataxin 7, ataxin 8, ataxin 10, Lewy body, atrial natriuretic factor, islet amyloid polypeptide, insulin, apolipoprotein AI, serum amyloid A, medin, prolactin, transthyretin, lysozyme, beta 2 microglobulin, gelsolin, keratoepithelin, cystatin, immunoglobulin light chain AL, S-IBM protein, Repeat-associated non-ATG (RAN) translation products, DiPeptide repeat (DPR) peptides, glycine-alanine (GA) repeat peptides, glycine-proline (GP) repeat peptides, glycine-arginine (GR) repeat peptides, proline-alanine (PA) repeat peptides, ubiquitin, and proline-arginine (PR) repeat peptides; (d) ligands and/or proteins expressed on immune cells, wherein the ligands and/or proteins selected from the group consisting of CD40, OX40, ICOS, CD28, CD137/4-1BB, CD27, GITR, PD-L1, CTLA-4, PD-L2, PD-1, B7-H3, B7-H4, HVEM, BTLA, KIR, GALS, TIM3, A2AR, LAG-3, and phosphatidylserine; and (e) a protein, lipid, polysaccharide, or glycolipid expressed on one or more tumor cells. In some embodiments, the antibody binds specifically to both human TREM2 and cynomolgus monkey TREM2. In some embodiments, the antibody has a dissociation constant (K_{D}) for human TREM2 and/or cynomolgus monkey TREM2 that is at least 1-fold lower than an anti-TREM2 antibody comprising a heavy chain variable region comprising the amino acid sequence of SEQ ID NO:1734 and a light chain variable region comprising the amino acid sequence of SEQ ID NO:1763; or at least 1-fold lower than an anti-TREM2 antibody comprising a heavy chain variable region comprising the amino acid sequence of SEQ ID NO:1798 and a light chain variable region comprising the amino acid sequence of SEQ ID NO:1810. In some embodiments, the antibody has a dissociation constant (K_{D}) for human TREM2 that ranges from about 9 μM to about 100 pM, or less than 100 pM, wherein the K_{D} is determined at a temperature of approximately 25° C. In some embodiments, the antibody has a dissociation constant (K_{D}) for cynomolgus monkey TREM2 that ranges from about 50 nM to about 100 pM, or less than 100 pM, wherein the K_{D} is determined at a temperature of approximately 25° C. In some embodiments, the antibody binds to primary human immune cells with an affinity that is at least 10 times higher than that of an anti-TREM2 antibody comprising a heavy chain variable region comprising the amino acid sequence of SEQ ID NO:1734 and a light chain variable region comprising the amino acid sequence of SEQ ID NO:1763; or at least 10 times higher than an anti-TREM2 antibody comprising a heavy chain variable region comprising the amino acid sequence of SEQ ID NO:1798 and a light chain variable region comprising the amino acid sequence of SEQ ID NO:1810. In some embodiments, the antibody clusters and activates TREM2 signaling in an amount that is at least 1-fold greater than that of an anti-TREM2 antibody comprising a heavy chain variable region comprising the amino acid sequence of SEQ ID NO:1734 and a light chain variable region comprising the amino acid sequence of SEQ ID NO:1763; or at least 1-fold greater than an anti-TREM2 antibody comprising a heavy chain variable region comprising the amino acid sequence of SEQ ID NO:1798 and a light chain variable region comprising the amino acid sequence of SEQ ID NO:1810. In some embodiments, the antibody increases immune cell survival in vitro that to an extent that is greater than an anti-TREM2 antibody comprising a heavy chain variable region comprising the amino acid sequence of SEQ ID NO:1734 and a light chain variable region comprising the amino acid sequence of SEQ ID NO:1763; or that is greater than an anti-TREM2 antibody comprising a heavy chain variable region comprising the amino acid sequence of SEQ ID NO:1798 and a light chain variable region comprising the amino acid sequence of SEQ ID NO:1810. In some embodiments, the antibody has an in vivo half-life that is lower than a human control IgG1 antibody. In some embodiments, the antibody decreases plasma levels of soluble TREM2 in vivo by an amount that is at least 25% greater than that of a human control IgG1 antibody. In some embodiments, the antibody decreases plasma levels of soluble TREM2 in vivo by blocking cleavage, by inhibiting one or more metalloproteases, and/or by inducing internalization. In some embodiments, soluble TREM2 is decreased by about any of 10, 20, 30, 40, or 50%. In some embodiments, the antibody competes with one or more antibodies selected from the group consisting of AL2p-h50, AL2p-2, AL2p-3, AL2p-4, AL2p-5, AL2p-6, AL2p-7, AL2p-8, AL2p-9, AL2p-10, AL2p-11, AL2p-12, AL2p-13, AL2p-14, AL2p-15, AL2p-16, AL2p-17, AL2p-18, AL2p-19, AL2p-20, AL2p-21, AL2p-22, AL2p-23, AL2p-24, AL2p-25, AL2p-26, AL2p-27, AL2p-28, AL2p-29, AL2p-30, AL2p-31, AL2p-32, AL2p-33, AL2p-h77, AL2p-35, AL2p-36, AL2p-37, AL2p-38, AL2p-39, AL2p-40, AL2p-41, AL2p-42, AL2p-43, AL2p-44, AL2p-45, AL2p-46, AL2p-47, AL2p-48, AL2p-49, AL2p-50, AL2p-51, AL2p-52, AL2p-53, AL2p-54, AL2p-55, AL2p-56, AL2p-57, AL2p-58, AL2p-59, AL2p-60, AL2p-61, AL2p-62, AL2p-h19, AL2p-h21, AL2p-h22, AL2p-h23, AL2p-h24, AL2p-h25, AL2p-h26, AL2p-h27, AL2p-h28, AL2p-h29, AL2p-h30, AL2p-h31, AL2p-h32, AL2p-h33, AL2p-h34, AL2p-h35, AL2p-h36, AL2p-h42, AL2p-h43, AL2p-h44, AL2p-h47, AL2p-1159, AL2p-h76, AL2p-h90, and any combination thereof for binding to TREM2. In some embodiments, the antibody binds essentially the same TREM2 epitope as an antibody selected from the group consisting of: AL2p-h50, AL2p-2, AL2p-3, AL2p-4, AL2p-5, AL2p-6, AL2p-7, AL2p-8, AL2p-9, AL2p-10, AL2p-11, AL2p-12, AL2p-13, AL2p-14, AL2p-15, AL2p-16, AL2p-17, AL2p-18, AL2p-19, AL2p-20, AL2p-21, AL2p-22, AL2p-23, AL2p-24, AL2p-25, AL2p-26, AL2p-27, AL2p-28, AL2p-29, AL2p-30, AL2p-31, AL2p-32, AL2p-33, AL2p-h77, AL2p-35, AL2p-36, AL2p-37, AL2p-38, AL2p-39, AL2p-40, AL2p-41, AL2p-42, AL2p-43, AL2p-44, AL2p-45, AL2p-46, AL2p-47, AL2p-48, AL2p-49, AL2p-50, AL2p-51, AL2p-52, AL2p-53, AL2p-54, AL2p-55, AL2p-56, AL2p-57, AL2p-58, AL2p-59, AL2p-60, AL2p-61, AL2p-62, AL2p-h19, AL2p-h21, AL2p-h22, AL2p-h23, AL2p-h24, AL2p-h25, AL2p-h26, AL2p-h27, AL2p-h28, AL2p-h29, AL2p-h30, AL2p-h31, AL2p-h32, AL2p-h33, AL2p-h34, AL2p-h35, AL2p-h36, AL2p-h42, AL2p-h43, AL2p-h44, AL2p-h47, AL2p-h59, AL2p-h76, and AL2p-h90. In some embodiments, the antibody binds to one or more amino acids within amino acid residues 149-157 of SEQ ID NO:1. In some embodiments, the antibody binds to one or more amino acid residues selected from the group consisting of E151, D152, and E156 of SEQ ID NO:1.

[0359] In some embodiments, the antibody is an antibody disclosed in Tables 2A, 2B, 2C, 3A, 3B, 3C, 4A-4D, 5A-5D, 6A, 6B, 7A or 7B of PCT Patent Application Publication No. WO2019/028292A1, reproduced below as TABLES E1-E18.

TABLE E1
Heavy chain HVR H1 sequences of anti-TREM2 antibodies

| Ab | HVR H1 |
|---|---|
| AL2p-h50, AL2p-2, AL2p-3, AL2p-4, AL2p-5, AL2p-6, AL2p-33, | YAFSSSWMN |
| AL2p-h77, and AL2p-36 | (SEQ ID NO:1831) |
| AL2p-29, AL2p-30, AL2p-31, AL2p-37, AL2p-58, AL2p-60, AL2p-61, | YAFSSQWMN |
| and AL2p-62 | (SEQ ID NO:1839) |
| AL2p-10, AL2p-11, AL2p-45, AL2p-46, AL2p-47, AL2p-48, | YAFSSDWMN |
| and AL2p-49 | (SEQ ID NO:1843) |
| AL2p-7 and AL2p-8 | YAFSLSWMN |
| | (SEQ ID NO:1864) |
| AL2p-9 | YAFSRSWMN |
| | (SEQ ID NO:1865) |
| AL2p-12, AL2p-13, AL2p-14, AL2p-15, AL2p-16, AL2p-17, AL2p-18, | YAFSSHWMN |
| AL2p-19, AL2p-20, AL2p-21, AL2p-22, AL2p-23, AL2p-24, AL2p-25, | (SEQ ID NO:1866) |
| AL2p-26AL2p-27, AL2p-28, AL2p-38, AL2p-39, AL2p-40, AL2p-41, | |
| AL2p-42, AL2p-43, AL2p-44, AL2p-50, AL2p-51, AL2p-52, AL2p-53, | |
| AL2p-54. AL2p-55, AL2p-56, AL2p-57, and AL2p-59 | |
| AL2p-32 | YAFSSEWMN |
| | (SEQ ID NO:1867) |
| AL2P-35 | YAFWSSWMN |
| | (SEQ ID NO:1868) |
| Formula I | YAFX₁X₂X₃WMN |
| | X₁is S or W |
| | X₂is S, L, or R |
| | X₃is S, D, H, Q, or E |
| | (SEQ ID NO: 1828) |

TABLE E2
Heavy chain HVR H2 sequences of anti-TREM2 antibodies

| Ab | HVR H2 |
|---|---|
| AL2p-h50, AL2p-5, AL2p-6, AL2p-9, AL2p-10, AL2p-14, AL2p-15, | RIYPGDGDTNYAQKFQG |
| AL2p-29, AL2p-32, AL2p-33, AL2p-h77, and AL2p-35 | (SEQ ID NO:1832) |
| AL2p-31 and AL2p-60 | RIYPGGGDTNYARKFQG |
| | (SEQ ID NO:1840) |
| AL2p-37 and AL2p-58 | RIYPGGGDTNYAGKFQG |
| | (SEQ ID NO:1842) |
| AL2p47, AL2p-48, AL2p-49 | RIYPGEGDTNYARKFHG |
| | (SEQ ID NO:1844) |
| AL2p-45, AL2p46, and AL2p-61 | RIYPGEGDTNYARKFQG |
| | (SEQ ID NO:1848) |
| AL2p-62 | RIYPGEGDTNYAGKFQG |
| | (SEQ ID NO:1850) |
| AL2p-2 and AL2p-24 | RIYPGGGDTNYAQKFQG |
| | (SEQ ID NO:1869) |
| AL2p-3 | RIYPGEGDTNYAQKFQG |
| | (SEQ ID NO:1870) |
| AL2p-4 and AL2p-27 | RIYPGQGDTNYAQKFQG |
| | (SEQ ID NO:1871) |
| AL2p-7 and AL2p-16 | RIYPGDGDTNYAQKFRG |
| | (SEQ ID NO:1872) |
| AL2p-8, AL2p-11, AL2p-19, AL2p-20, and AL2p-36 | RIYPGDGDTNYARKFQG |
| | (SEQ ID NO:1873) |
| AL2p-12 | RIYPGDGDTNYAHKFQG |
| | (SEQ ID NO:1874) |
| AL2p-13 | RIYPGDGDTNYAQKFKG |
| | (SEQ ID NO:1875) |
| AL2p-17 | RIYPGDGDTNYAQKRQG |
| | (SEQ ID NO:1876) |
| AL2p-18 | RIYPGDGDTNYAQKWQG |
| | (SEQ ID NO:1877) |
| AL2p-21 and AL2p-30 | RIYPGDGDTNYAWKFQG |
| | (SEQ ID NO:1878) |
| AL2p-22 | RIYPGDGDTNYAYKFQG |
| | (SEQ ID NO:1879) |
| AL2p-23 | RIYPGDGQTNYAQKRQG |
| | (SEQ ID NO:1880) |
| AL2p-25, AL2p-38, AL2p-39, and AL2p-40 | RIYPGGGDTNYAQKFRG |
| | (SEQ ID NO:1881) |
| AL2p-26 | RIYPGGGDTNYAQKRQG |
| | (SEQ ID NO:1882) |
| AL2p-28 | RIYPGVGDTNYAQKFQG |
| | (SEQ ID NO:1883) |
| AL2p-41 and AL2p-42 | RIYPGEGDTNYAQKFRG |
| | (SEQ ID NO:1884) |
| AL2p-43 and AL2p44 | RIYPGGGDTNYARKFRG |
| | (SEQ ID NO:1885) |
| AL2p-50, AL2p-51, AL2p-52, AL2p-53, AL2p-54, AL2p-55, AL2p-56, | RIYPGEGDTNYAQKFHG |
| and AL2p-57 | (SEQ ID NO:1886) |
| AL2p-59 | RIYPGEGQTNYAQKRQG |
| | (SEQ ID NO:1887) |
| Formula II | RIYPGX1GX2TNYAX₃is KX₄ |
| | X₅G |
| | X₁is D, G, E, Q, or V |
| | X₂is D or Q |
| | X₁is Q, R, H, W, Y, or G |
| | X₄is F, R, or W |
| | X₅is Q, R, K, or H |
| | (SEQ ID NO: 1829) |

TABLE E3
Heavy chain HVR H3 sequences of anti-TREM2 antibodies

| Ab | HVR 113 |
|---|---|
| AL2p-h50, AL2p-2, AL2p-3, AL2p-4, AL2p-5, AL2p-6, AL2p-7, AL2p- | ARLLRNQPGESYAMDY |
| 10, AL2p-11, AL2p-12, AL2p-13, AL2p-14. A L2p-15,, Al2p-17, AL2p- | (SEQ ID NO:1833) |
| 19, AL2p-20, AL2p-21, AL2p-22, AL2p-23, AL2p-24, AL2p-25, AL2p- | |
| 26, AL2p-27, AL2p-28, AL2p-29, AL2p-30. AL2p-3 1, AL2p-32, AL2p- | |
| 33, AL2p-h77, AL2p-37, AL2p-50, AL2p-51, AL2p-52, AL2p-53, AL2p- | |
| 58, AL2p-59. AL2p-60, AL2p-61, and AL2p-62 | |
| AL2p-45, AL2p-46, AL2p-47, AL2p-48, AL2p-49, AL2p-54, AL2p-55, | ARLLRNKPGESYAMDY |
| AL2p-56, and AL2p-57 | (SEQ ID NO:1845) |
| AL2p-8 and AL2p-18 | ARLLRNQPGSSYAMDY |
| | (SEQ ID NO:1888) |
| AL2p-9, AL2p-16, AL2p-36, AL2p-38, AL2p-39, AL2p-40, AL2p-41, | ARLLRNQPGASYAMDY |
| AL2p-42, AL2p-43, and AL2p-44 | (SEQ ID NO:1889) |
| AL2p-35 | ARLLRNQPGESYAHDY |
| | (SEQ ID NO:1890) |
| Formula III | ARLLRNX₁PGX₂SYAX₃DY |
| | X₁ is Q or K |
| | X₂ is E, S, or A |
| | X₃ is M or H |
| | (SEQ ID NO:1830) |

TABLE E4
Light chain HVR LI sequences of anti-TREM2 antibodies

| Ab | HVR L1 |
|---|---|
| AL2p-h50, AL2p-2, AL2p-3, AL2p-4, AL2p-10, AL2p-12, | RSSQSLVHSNGYTYLH |
| AL2p-31, AL2p-32, AL2p-h77, AL2p-35, AL2p-36. and | (SEQ ID NO:1837) |
| AL2p-37 | |
| AL2p-45, AL2p-47, AL2p-50. AL2p-52, AL2p-55, and | RTSQSLVHSNAYTYLH |
| AL2p-56 | (SEQ ID NO:1846) |
| AL2p-61 and AL2p-62 | RSSQSLVHSNQYTYLH |
| | (SEQ ID NO:1849 |
| AL2p-5, AL2p-58, and AL2p-60 | RSSQSLVHSNRYTYLH |
| | (SEQ ID NO:1851) |
| AL2p-6 | RSSQSLVHSNWYTYLH |
| | (SEQ ID NO:1891) |
| AL2p-7, AL2p-8, AL2p-13, and AL2p-26 | RSSQSLIHSNGYTYLH |
| | (SEQ ID NO:1892) |
| AL2p-9, AL2p-16, AL2p-18. AL2p-20, AL2p-23, AL2p-25, | RTSQSLVHSNGYTYLH |
| AL2p-28, and AL2p-33 | (SEQ ID NO:1893) |
| AL2p-11, AL2p-14, AL2p-17, AL2p-19, AL2p-22, AL2p- | RSSRSLVHSNGYTYLH |
| 24, AL2p-27. and AL2p-29 | (SEQ ID NO:1894) |
| AL2p-15, AL2p-21, and AL2p-30 | RSSSSLVHSNGYTYLH |
| | (SEQ ID NO:1895) |
| AL2p-38 and AL2p-43 | RSSRSLVHSNRYTYLH |
| | (SEQ ID NO:1896) |
| AL2p-39 and AL2p-41 | RSSRSLVHSNQYTYLH |
| | (SEQ ID NO:1897) |
| AL2p-40, AL2p-42, and AL2p-44 | RTSRSLVHSNRYTYLH |
| | (SEQ ID NO:1898) |
| AL2p-46, AL2p-48, AL2p-49, AL2p-51, AL2p-53, AL2p- | RTSQSLVHSNQYTYLH |
| 54, AL2p-57, and AL2p-59 | (SEQ ID NO:1899) |
| Formula IV | RX₁SX₂SLX₃HSNX₄YTYLH |
| | X₁ is S or T |
| | X₂ is Q, R, or S |
| | X₃ is V or I |
| | X₄ is G, R, W, Q or A |
| | (SEQ ID NO:1834) |

TABLE E5
Light chain HVR L2 sequences of anti-TREM2 antibodies

| Ab | HVR L2 |
|---|---|
| AL2p-h50, AL2p-2, AL2p-3, AL2p-4, AL2p-5, AL2p-6, AL2p-14, AL2p-24, | KVSNRFS |
| AL2p-29, AL2p-h77, AL2p-35, AL2p-36, AL2p-37, AL2p-58, and AL2p-62 | (SEQ ID NO:1838) |
| AL2p-7, AL2p 8, AL2p 10, AL2p 12, AL2p-13, AL2p 22, AL2p-26, AL2p-31, | KVSNRRS |
| AL2p-32, AL2p 38, AL2p 39. AL2p-40, AL2p-41, AL2p-42, AL2p-43, AL2p-44, | (SEQ ID NO: 1841 |
| AL2p-60, and AL2p-61 | |
| AL2p-9, AL2p-11, AL2p-16, AL2p-17, AL2p-18, AL2p-19, AL2p-20, AL2p-23, | KVSNRVS |
| AL2p-25, AL2p-27, AL2p-28, AL2p-33, AL2p-45, AL2p-46, AL2p-47, AL2p- | (SEQ ID NO:1847) |
| 48, AL2p-49, AL2p-50, AL2p-51, AL2p-52, AL2p-53, AL2p-54, AL2p-55, | |
| AL2p-56, AL2p-57, and AL2p-59 | |
| AL2p-15, AL2p-21, and AL2p-30 | KVSNRKS |
| | (SEQ ID NO:1900) |
| Formula V | KVSNRX₁S |
| | X₁ is F, R, V, or K |
| | (SEQ ID NO:1835) |

TABLE E6
Light chain HVR L3 sequences of anti-TR FM2 antibodies

| Ab | HVR L3 |
|---|---|
| AL2p-h50, AL2p-2, AL2p-3, AL2p-4, AL2p-5, AL2p-6, AL2p-7, | SQSTRVPYT (SEQ ID NO:1836) |

AL2p-8,AL2p-9, AL2p-10, AL2p-11, AL2p-12, AL2p-13, AL2p-14,
AL2p-15, AL2p-16, AL2p-17, AL2p-18, AL2p-19, AL2p-20, AL2p-21,
AL2p-22, AL2p-23, AL2p-24, AT 2p-25, AL2p-26, AL2p-27, AL2p-28,
AL2p-29, AL2p-30, AL2p-31, AL2p-32, AL2p-33, AL2p-h77, AL2p-
35, AL2p-36, AL2p-37, AL2p-38, AL2p-39, AL2p-40, AL2p-41,
AL2p-42, AL2p-43, AL2p-44, AL2p-45, AL2p-46, AL2p-47, AL2p-48,
AL2p-49, AL2p-50, AL2p-51, AL2p-52, AL2p-53, AL2p-54, AL2p-55,
AL2p-56, AL2p-57, AL2p-58, AL2p-59, AL2p-60, AL2p-61, and
AL2p-62

TABLE E7
Heavy chain framework I sequences of anti-TREM2 antibodies

| Ab | VH FR1 |
|---|---|
| AL2p-h50, AL2p-2, AL2p-3, AL2p-4, AL2p-5, AL2p-6, AL2p-7, AL2p- | QVQLVQSGAEVKKPGSSVKVS |
| 8, AL2p-9, AL2p-10, AL2p-11, AL2p-12, AL2p-13, AL2p-14, AL2p-15, | CKASG (SEQ ID NO:1716) |
| AL2p-16, AL2p-17, AL2p-18, AL2p-19, AL2p-20, AL2p-21, AL2p-22 | |
| AL2p-23, AL2p-24, AL2p-25, AL2p-26, AL2p-27, AL2p-28, AL2p-29, | |
| AL2p-30, AL2p-31, AL2p-32, AL2p-38, AL2p-39, AL2p-40, AL2p-41, | |
| AL2p-42, AL2p-43, AL2p-44, AL2p-45, AL2p-46, AL2p-47, AL2p-48, | |
| AL2p-50, AL2p-51, AL2p-54, AL2p-59, AL2p-60, and AL2p-61 | |

| | |
|---|---|
| AL2p-33. AL2p-49, AL2p-52, AL2p-53, AL2p-55, AL2p-56, and | EVQLVQSGAEVKKPGSSVKVS |
| AL2p-57 | CKASG (SEQ ID NO:1717) |
| AL2p-h77, AL2p-35, AL2p-36, AL2p-37. AL2p-58. and AL2p-62 | QVQLVQSGAEVKKPGASVKVS |
| | CKASG (SEQ ID NO:1718) |

TABLE E8
Heavy chain framework 2 sequences of anti-TREM2 antibodies

| Ab | VH FR2 |
|---|---|
| AL2p-h50, AL2p-2, AL2p-3, AL2p-4, AL2p-5,AL2p-6, AL2p-7, AL2p- | WVRQAPGQGLEWMG |
| 8, AL2p-9, AL2p-10, AL2p-11, AL2p-12, AL2p-13, AL2p-14, AL2p-15, | (SEQ ID NO:1719) |
| AL2p-16, AL2p-17, AL2p-18, AL2p-19, AL2p-20, AL2p-21, AL2p-22, | |
| AL2p-23, AL2p-24, AL2p-25, AL2p-26, AL2p-27, AL2p-28, AL2p-29, | |
| AL2p-30, AL2p-31, AL2p-32, AL2p-33, AL2p-38, AL2p-39, AL2p- | |
| 40, AL2p-41, AL2p-42, AL2p-43, AL2p-44, AL2p-45, AL2p-46, | |
| AL2p-47, AL2p48, AL2p-49, AL2p- 50, AL2p-51, AL2p-52, AL2p- | |
| 53, AL2p-54, AL2p-55, AL2p-56, AL2p-57, AL2p-59, AL2p-60, | |
| and AL2p-61 | |
| AL2p-h77, AL2p-35, AL2p-36, AL2p-37, AL2p-58, and AL2-62 | WVRQAPGQRLEWIG |
| | (SEQ ID NO:1720) |

TABLE E9
Heavy chain framework 3 sequences of anti-TREM2 antibodies

| Ab | VH FR3 |
|---|---|
| AL2p-h50, AL2p-2, AL2p-3. AL2p-4, AL2p-5, AL2p-6, AL2p-7, | RVTITADESTSTAYMEL |
| AL2p-8, AL2p-9, AL2p-10, AL2p-11, AL2p-12, AL2p-13, AL2p- | SSLRSEDTAVYYC |
| 14, AL2p-15, AL2p-16, AL2p-17, AL2p-18, AL2p-19, AL2p-20, | (SEQ ID NO:1721) |
| AL2p-21, AL2p-22, AL2p-23, AL2p-24, AL2p-25, AL2p-26, AL2p- | |
| 27, AL2p-28, AL2p-29, AL2p-30, AL2p-31, AL2p-32, AL2p-33, | |
| AL2p-38, AL2p-39, AL2p-40, AL2p-41, AL2p-42, AL2p-43, AL2p- | |
| 44, AL2p-45, AL2p-46, AL2p-47, AL2p-48, AL2p-49, AL2p-50, | |
| AL2p-51, AL2p-52, AL2p-53, AL2p-54, AL2p-55, AL2p-56, AL2p- | |
| 57, AL2p-59, AL2p-60, and AL2p-61 | |
| AL2p-h77, AL2p-35, AL2p-36, AL2p-37-AL2p-58, and AL2p-62 | RVTITADTSASTAYMEL |
| | SSLRSEDTAVYYC |
| | (SEQ ID NO:1722) |

TABLE E10
Heavy chain framework 4 sequences of anti-TREM2 antibodies

| Ab | VH FR4 |
|---|---|
| AL2p-h50, AL2p-2, AL2p-3, AL2p-4, AL2p-5, AL2p-6, AL2p-7, | WGQGTLVTVSS |
| AL2p-8, AL2p-9, AL2p-10, AL2p-11, AL2p-12, AL2p-13, AL2p- | (SEQ ID NO:1723) |
| 14, AL2p-15, AL2p-16, AL2p-17, AL2p-18, AL2p-19, AL2p-20, | |
| AL2p-21, AL2p-22, AL2p-23, AL2p-24, AL2p-25, AL2p-26, | |
| AL2p-27, AL2p-28, AL2p-29, AL2p-30, AL2p-31, AL2p-32, | |
| AL2p-33, AL2p-h77, AL2p-35, AL2p-36, AL2p-37, AL2p-38, | |
| AL2p-39, AL2p- 40, AL2p-41, AL2p-42, AL2p-43, AL2p-44, | |
| AL2p-45, AL2p-46, AL2p-47, AL2p-48, AL2p-49, AL2p-50, | |
| AL2p-51, AL2p-52, AL2p-53, AL2p-54, AL2p-55, AL2p-56, | |
| AL2p-57, AL2p-58, AL2p-59, AL2p-60. AL2p-61, and AL2p-62 | |

TABLE E11
Light chain framework 1 sequences of anti-TREM2 antibodies

| Ab | VL FR1 |
|---|---|
| AL2p-h50, AL2p-2, AL2p-3, AL2p-4, AL2p-5, AL2p-6, AL2p-11, | DVVMTQTPLSLSVTPGQPASI |
| AL2p-17, AL2p-19, AL2p-45, AL2p-46, AL2p-47, AL2p-48, AL2p- | SC(SEQ ID NO:1724) |
| 49, AL2p-50, AL2p-51, AL2p-52, AL2p-53, AL2p-54, AL2p-55, | |
| AL2p-56, and AL2p-57 | |
| AL2p-7, AL2p-8, AL2p-9, AL2p-10, AL2p-12, AL2p-13, AL2p- | GVVMTQTPLSLSVTPGQPASI |
| 14, AL2p-15, AL2p-16, AL2p-18, AL2p-20, AL2p-21, AL2p-22, | SC(SEQ ID NO:1725) |
| AL2p-23, AL2p-24, AL2p-25, AL2p-26, AL2p-27, AL2p-28, | |
| AL2p-29, AL2p-30, AL2p-31, AL2p-32, AL2p-38, AL2p-39, | |
| AL2p-40, AL2p-41, AL2p-42, AL2p-43, AL2p-44, AL2p-59, | |
| AL2p-60, and AL2p-61 | |
| AL2p-33 | GVVMAQTPLSLSVTPGQPASI |
| | Sc (SEQ ID NO:1726 |
| AL2p-h77, AL2p-35, AL2p-36, AL2p-37, AL2p-58, and AL2p-62 | DVVMTQSPDSLAVSLGERAT |
| | INC (SEQ ID NO:1727) |

TABLE E12
Light chain framework 2 sequences of anti-TREM2 antibodies

| Ab | VL FR2 |
|---|---|
| AL2p-h50, AL2p-2, AL2p-3, AL2p-4, AL2p-5, AL2p-6, AL2p-7, | WYLQKPGQSPQLLIY |
| AL2p-8, AL2p-9, AL2p-10, AL2p-11, AL2p-12, AL2p-13, AL2p- | (SEQ ID NO:1728) |
| 14, AL2p-15, AL2p-16, AL2p-17, AL2p-18, AL2p-19, AL2p-20, | |
| AL2p-21, AL2p-22, AL2p-23, AL2p-24, AL2p-25, AL2p-26, | |
| AL2p-27, AL2p-28, AL2p-29, AL2p-30, AL2p-31, AL2p-32, AL2p- | |
| 33, AL2p-38, AL2p-39, AL2p-40, AL2p-41, AL2p-42, AL2p-43, | |
| AL2p-44, AL2p-45, AL2p-46, AL2p-47, AL2p-48, AL2p-49, | |
| AL2p-50, AL2p-51, AL2p-52, AL2p-53, AL2p-54, AL2p-55, | |
| AL2p-56, AL2p-57, AL2p-59, AL2p-60 and AL2p-61 | |
| AL2p-h77, AL2p-35, AL2p-36, AL2p-37, AL2p-58, and AL2p-62 | WYQQKPGQSPKLLIY |
| | (SEQ ID NO:1729) |

TABLE E13
Light chain framework 3 sequences of anti-TREM2 antibodies

| Ab | VL FR3 |
|---|---|
| AL2p-h50, AL2p-2, AL2p-3, AL2p-4, AL2p-5, AL2p-6, AL2p-7, | GVPDRFSGSGSGTDFTL |
| AL2p-8, AL2p-9, AL2p-10, AL2p-11. AL2p-12, AL2p-13, AL2p-14, | KISRVEAEDVGVYYC |
| AL2p-15, AL2p-16, AL2p-17, AL2p-18, AL2p-19, AL2p-20, AL2p- | (SEQ ID NO: 1730) |
| 21, AL2p-22, AL2p-23, AL2p-24, AL2p-25, AL2p-26, AL2p-27, | |
| AL2p-28, AL2p-29, AL2p-30, AL2p-31, AL2p-32, AL2p-33, | |
| AL2p-38, AL2p-39, AL2p-40, AL2p-41, AL2p-42, AL2p-43, | |
| AL2p-44, AL2p-45, AL2p-46, AL2p-47, AL2p-48, AL2p-49, | |
| AL2p-50, AL2p-51. AL2p-52, AL2p-53, AL2p-54, AL2p-55, | |
| AL2p-56, AL2p-57, AL2p-58, AL2p-59, AL2p-60, and AL2p-61 | |
| AL2p-h77, AL2p-35, AL2p-36, AL2p-37, and AL2-67 | GVPDRFSGSGSGTDFTL |
| | TISSLQAEDVAVYYC |
| | (SEQ ID NO: 1731) |

TABLE E14
Light chain framework 4 sequences of anti-TREM2 antibodies

| Ab | VL FR4 |
|---|---|
| AL2p-h50, AL2p-2, AL2p-3, AL2p-4, AL2p-5. AT 2p-6. AL2p-7, | FGQGTKLEIK |
| AL2p-8, AL2p-9, AL2p-10, AL2p-11, AL2p-12, AL2p-13, AL2p- | (SEQ ID NO: 1732) |
| 14, AL2p-15, AL2p-16, AL2p-17, AL2p-18, AL2p-19, AL2p-20, | |
| AL2p-21, AL2p-22, AL2p-23, AL2p-24, AL2p-25, AL2p-26, | |
| AL2p-27, AL2p-28, AL2p-29, AL2p-30, AL2p-31, AL2p-32, | |
| AL2p-33, AL2p-38, AL2p-39, AL2p-40, AL2p-41, AL2p-42, | |
| AL2p-43, AL2p-44, AL2p-45, AL2p-46, AL2p-47, AL2p-48, | |
| AL2p-49, AL2p-50, AL2p-51, AL2p-52, AL2p-53, AL2p-54, | |
| AL2p-55, AL2p-56, AL2p-57, AL2p-58, AL2p-59, AL2p-60, and | |
| AL2p-61 | |
| AL2p-h77. AL2p-35, AL2p-36, AL2p-37, and AL2p-62 | FGGGTKVEIK |
| | (SEQ ID NO: 1733 |

TABLE E15
Heavy chain variable region sequences of anti-TREM2 antibodies

| Ab | HCVR |
|---|---|
| AL2p-h50. AL2p-5, | QVQLVQSGAEVKKPGSSVKVSCKASGYAFSSSWMNWVRQAPGQGL |
| and AL2p-6 | EWMGRIYPGDGDTNYAQKFQGRVTITADESTSTAYMELSSLRSEDTA |
| | VYYCARLLRNQPGESYAMDYWGQGTLVTVSS (SEQ ID NO: 1734) |
| AL2p-2 | QVQLVQSGAEVKKPGSSVKVSCKASGYAFSSSWMNWVRQAPGQGLE |
| | WMGRIYPGGGDTNYAQKFQGRVTITADESTSTAYMELSSLRSEDTAV |
| | YYCARLLRNQPGESYAMDYWGQGTLVTVSS (SEQ ID NO: 1735) |
| AL2p-3 | QVQLVQSGAEVKKPGSSVKVSCKASGYAFSSSWMNWVRQAPGQGL |
| | EWMGRIYPGEGDTNYAQKFQGRVTITADESTSTAYMELSSLRSEDTA |
| | VYYCARLLRNQPGESYAMDYWGQGTLVTVSS (SEQ ID NO: 1736) |
| AL2p-4 | QVQLVQSGAEVKKPGSSVKVSCKASGYAFSSSWMNWVRQAPGQGL |
| | EWMGRIYPGQGDTNYAQKFQGRVTITADESTSTAYMELSSLRSEDTA |
| | VYYCARLLRNQPGESYAMDYWGQGTLVTVSS (SEQ ID NO: 1737 |
| AL2p-7 | QVQLVQSGAEVKKPGSSVKVSCKASGYAFSLSWMNWVRQAPGQGL |
| | EWMGRIYPGDGDTNYAQKFRGRVTITADESTSTAYMELSSLRSEDTA |
| | VYYCARLLRNQPGESYAMDYWGQGTLVTVSS (SEQ ID NO: 1738) |
| AL2p-8 | QVQLVQSGAEVKKPGSSVKVSCKASGYAFSLSWMNWVRQAPGQGL |
| | EWMGRIYPGDGDTNYARKFQGRVTITADESTSTAYMELSSLRSEDTA |
| | VYYCARLLRNQPGSSYAMDYWGQGTLVTVSS (SEQ ID NO: 1739) |
| AL2p-9 | QVQLVQSGAEVKKPGSSVKVSCKASGYAFSRSWMNWVRQAPGQGL |
| | EWMGRIYPGDGDTNYAQKFQGRVTITADESTSTAYMELSSLRSEDTA |
| | VYYCARLLRNQPGASYAMDYWGQGTLVTVSS (SEQ ID NO: 1740) |
| AL2p-10 | QVQLVQSGAEVKKPGSSVKVSCKASGYAFSSDWMNWVRQAPGQGL |
| | EWMGRIYPGDGDTNYAQKFQGRVTITADESTSTAYMELSSLRSEDTA |
| | VYYCARLLRNQPGESYAMDYWGQGTLVTVSS (SEQ ID NO: 1741) |
| AL2p-11 | QVQLVQSGAEVKKPGSSVKVSCKASGYAFSSDWMNWVRQAPGQGL |
| | EWMGRIYPGDGDTNYARKFQGRVTITADESTSTAYMELSSLRSEDTA |
| | VYYCARLLRNQPGESYAMDYWGQGTLVTVSS (SEQ ID NO: 1742) |
| AL2p-12 | QVQLVQSGAEVKKPGSSVKVSCKASGYAFSSHWMNWVRQAPGQGL |
| | EWMGRIYPGDGDTNYAHKFQGRVTITADESTSTAYMELSSLRSEDTA |
| | VYYCARLLRNQPGESYAMDYWGQGTLVTVSS (SEQ ID NO: 1743) |
| AL2p-13 | QVQLVQSGAEVKKPGSSVKVSCKASGYAFSSHWMNWVRQAPGQGL |
| | EWMGRIYPGDGDTNYAQKFKGRVTITADESTSTAYMELSSLRSEDTA |
| | VYYCARLLRNQPGESYAMDYWGQGTLVTVSS (SEQ ID NO: 1744) |
| AL2p-14 and AL2p-15 | QVQLVQSGAEVKKPGSSVKVSCKASGYAFSSHWMNWVRQAPGQGL |
| | EWMGRIYPGDGDTNYAQKFQGRVTITADESTSTAYMELSSLRSEDTA |
| | VYYCARLLRNQPGESYAMDYWGQGTLVTVSS (SEQ ID NO: 1745) |
| AL2p-I6 | QVQLVQSGAEVKKPGSSVKVSCKASGYAFSSHWMNWVRQAPGQGL |
| | EWMGRIYPGDGDTNYAQKFRGRVTITADESTSTAYMELSSLRSEDTA |
| | VYYCARLLRNQPGASYAMDYWGQGTLVTVSS (SEQ ID NO: 1746) |
| AL2p-17 | QVQLVQSGAEVKKPGSSVKVSCKASGYAFSSHWMNWVRQAPGQGL |
| | EWMGRIYPGDGDTNYAQKRQGRVTITADESTSTAYMELSSLRSEDTA |
| | VYYCARLLRNQPGESYAMDYWGQGTLVTVSS (SEQ ID NO: 1747) |
| AL2p-18 | QVQLVQSGAEVKKPGSSVKVSCKASGYAFSSHWMNWVRQAPGQGL |
| | EWMGRIYPGDGDTNYAQKWQGRVTITADESTSTAYMELSSLRSEDT |
| | AVYYCARLLRNQPGSSYAMDYWGQGTLVTVSS (SEQ ID NO: 1748) |
| AL2p-19 and AL2p-20 | QVQLVQSGAEVKKPGSSVKVSCKASGYAFSSHWMNWVRQAPGQGL |
| | EWMGRIYPGDGDTNYARKFQGRVTITADESTSTAYMELSSLRSEDTA |
| | VYYCARLLRNQPGESYAMDYWGQGTLVTVSS (SEQ ID NO: 1749) |
| AL2p-21 | QVQLVQSGAEVKKPGSSVKVSCKASGYAFSSHWMNWVRQAPGQGL |
| | EWMGRIYPGDGDTNYAWKFQGRVTITADESTSTAYMELSSLRSEDT |
| | AVYYCARLLRNQPGESYAMDYWGQGTLVTVSS (SEQ ID NO: 1750) |
| AL2p-22 | QVQLVQSGAEVKKPGSSVKVSCKASGYAFSSHWMNWVRQAPGQGL |
| | EWMGRIYPGDGDTNYAYKFQGRVTITADESTSTAYMELSSLRSEDTA |
| | VYYCARLLRNQPGESYAMDYWGQGTLVTVSS (SEQ ID NO: 1751) |
| AL2p-23 | QVQLVQSGAEVKKPGSSVKVSCKASGYAFSSHWMNWVRQAPGQGL |
| | EWMGRIYPGDGQTNYAQKRQGRVTITADESTSTAYMELSSLRSEDTA |
| | VYYCARLLRNQPGESYAMDYWGQGTLVTVSS (SEQ ID NO: 1752) |
| AL2p-24 | QVQLVQSGAEVKKPGSSVKVSCKASGYAFSSHWMNWVRQAPGQGL |
| | EWMGRIYPGGGDTNYAQKFQGRVTITADESTSTAYMELSSLRSEDTA |
| | VYYCARLLRNQPGESYAMDYWGQGTLVTVSS (SEQ ID NO: 1753 |
| AL2p-25 | QVQLVQSGAEVKKPGSSVKVSCKASGYAFSSHWMNWVRQAPGQGL |
| | EWMGRIYPGGGDTNYAQKFRGRVTITADESTSTAYMELSSLRSEDTA |
| | VYYCARLLRNQPGESYAMDYWGQGTLVTVSS (SEQ ID NO: 1754) |
| AL2p-26 | QVQLVQSGAEVKKPGSSVKVSCKASGYAFSSHWMNWVRQAPGQGL |
| | EWMGRIYPGGGDTNYAQKRQGRVTITADESTSTAYMELSSLRSEDTA |
| | VYYCARLLRNQPGESYAMDYWGQGTLVTVSS (SEQ ID NO: 1755) |
| AL2p-27 | QVQLVQSGAEVKKPGSSVKVSCKASGYAFSSHWMNWVRQAPGQGL |
| | EWMGRIYPGQGDTNYAQKFQGRVTITADESTSTAYMELSSLRSEDTA |
| | VYYCARLLRNQPGESYAMDYWGQGTLVTVSS (SEQ ID NO: 1756) |
| AL2p-28 | QVQLVQSGAEVKKPGSSVKVSCKASGYAFSSHWMNWVRQAPGQGL |
| | EWMGRIYPGVGDTNYAQKFQGRVTITADESTSTAYMELSSLRSEDTA |
| | VYYCARLLRNQPGESYAMDYWGQGTLVTVSS (SEQ ID NO: 1757) |
| AL2p-29 | QVQLVQSGAEVKKPGSSVKVSCKASGYAFSSQWMNWVRQAPGQGL |
| | EWMGRIYPGDGDTNYAQKFQGRVTITADESTSTAYMELSSLRSEDTA |
| | VYYCARLLRNQPGESYAMDYWGQGTLVTVSS (SEQ ID NO: 1758) |
| AL2p-30 | QVQLVQSGAEVKKPGSSVKVSCKASGYAFSSQWMNWVRQAPGQGL |
| | EWMGRIYPGDGDTNYAWKFQGRVTITADESTSTAYMELSSLRSEDT |
| | AVYYCARLLRNQPGESYAMDYWGQGTLVTVSS (SEQ ID NO: 1759) |
| AL2p-31, AL2p-60, | QVQLVQSGAEVKKPGSSVKVSCKASGYAFSSQWMNWVRQAPGQGL |
| and AL2p-h31 | EWMGRIYPGGGDTNYARKFQGRVTITADESTSTAYMELSSLRSEDTA |
| | VYYCARLLRNQPGESYAMDYWGQGTLVTVSS (SEQ ID NO: 1760) |
| AL2p-32 | QVQLVQSGAEVKKPGSSVKVSCKASGYAFSSEWMNWVRQAPGQGL |
| | EWMGRIYPGDGDTNYAQKFQGRVTITADESTSTAYMELSSLRSEDTA |
| | VYYCARLLRNQPGESYAMDYWGQGTLVTVSS (SEQ ID NO: 1761) |
| AL2p-33 | EVQLVQSGAEVKKPGSSVKVSCKASGYAFSSSWMNWVRQAPGQGL |
| | EWMGRIYPGDGDTNYAQKFQGRVTITADESTSTAYMELSSLRSEDTA |
| | VYYCARLLRNQPGESYAMDYWGQGTLVTVSS (SEQ ID NO: 1762) |
| AL2p-h77, AL2p-h26, | QVQLVQSGAEVKKPGASVKVSCKASGYAFSSSWMNWVRQAPGQRL |
| and AL2p-h90 | EWIGRIYPGDGDTNYAQKFQGRVTITADTSASTAYMELSSLRSEDTA |
| | VYYCARLLRNQPGESYAMDYWGQGTLVTVSS (SEQ ID NO: 1763) |
| AL2p-35 | QVQLVQSGAEVKKPGASVKVSCKASGYAFWSSWMNWVRQAPGQR |
| | LEWIGRIYPGDGDTNYAQKFQGRVTITADTSASTAYMELSSLRSEDT |
| | AVYYCARLLRNQPGESYAHDYWGQGTLVTVSS (SEQ ID NO: 1764) |
| AL2p-36 | QVQLVQSGAEVKKPGASVKVSCKASGYAFSSSWMNWVRQAPGQRL |
| | EWIGRIYPGDGDTNYARKFQGRVTITADTSASTAYMELSSLRSEDTA |
| | VYYCARLLRNQPGASYAMDYWGQGTLVTVSS (SEQ ID NO: 1765) |
| AL2p-37 and AL2p-58 | QVQLVQSGAEVKKPGASVKVSCKASGYAFSSQWMNWVRQAPGQRL |
| | EWIGRIYPGGGDTNYAGKFQGRVTITADTSASTAYMELSSLRSEDTA |
| | VYYCARLLRNQPGESYAMDYWGQGTLVTVSS (SEQ ID NO: 1766) |
| AL2p-38, AL2p-39, | QVQLVQSGAEVKKPGSSVKVSCKASGYAFSSHWMNWVRQAPGQGL |
| and AL2p-40 | EWMGRIYPGGGDTNYAQKFRGRVTITADESTSTAYMELSSLRSEDTA |
| | VYYCARLLRNQPGASYAMDYWGQGTLVTVSS (SEQ ID NO: 1767) |
| AL2p-41 and AL2p-42 | QVQLVQSGAEVKKPGSSVKVSCKASGYAFSSHWMNWVRQAPGQGL |
| | EWMGRIYPGEGDTNYAQKFRGRVTITADESTSTAYMELSSLRSEDTA |
| | VYYCARLLRNQPGASYAMDYWGQGTLVTVSS (SEQ ID NO: 1768) |
| AL2p-43 and AL2p-44 | QVQLVQSGAEVKKPGSSVKVSCKASGYAFSSHWMNWVRQAPGQGL |
| | EWMGRIYPGGGDTNYARKFRGRVTITADESTSTAYMELSSLRSEDTA |
| | VYYCARLLRNQPGASYAMDYWGQGTLVTVSS (SEQ ID NO: 1769) |
| AL2p-45 and AL2p-46 | QVQLVQSGAEVKKPGSSVKVSCKASGYAFSSDWMNWVRQAPGQGL |
| | EWMGRIYPGEGDTNYARKFQGRVTITADESTSTAYMELSSLRSEDTA |
| | VYYCARLLRNKPGESYAMDYWGQGTLVTVSS (SEQ ID NO: 1770) |
| AL2p-47 and AL2p-48 | QVQLVQSGAEVKKPGSSVKVSCKASGYAFSSDWMNWVRQAPGQGL |
| | EWMGRIYPGEGDTNYARKFHGRVTITADESTSTAYMELSSLRSEDTA |
| | VYYCARLLRNKPGESYAMDYWGQGTLVTVSS (SEQ ID NO: 1771) |
| AL2p-49 | EVQLVQSGAEVKKPGSSVKVSCKASGYAFSSDWMNWVRQAPGQGL |
| | EWMGRIYPGEGDTNYARKFHGRVTITADESTSTAYMELSSLRSEDTA |
| | VYYCARLLRNKPGESYAMDYWGQGTLVTVSS (SEQ ID NO: 1772) |
| AL2p-50 and AL2p-51 | QVQLVQSGAEVKKPGSSVKVSCKASGYAFSSHWMNWVRQAPGQGL |
| | EWMGRIYPGEGDTNYAQKFHGRVTITADESTSTAYMELSSLRSEDTA |
| | VYYCARLLRNQPGESYAMDYWGQGTLVTVSS (SEQ ID NO: 1773) |
| AL2p-52 and AL2p-53 | EVQLVQSGAEVKKPGSSVKVSCKASGYAFSSHWMNWVRQAPGQGL |
| | EWMGRIYPGEGDTNYAQKFHGRVTITADESTSTAYMELSSLRSEDTA |
| | VYYCARLLRNQPGESYAMDYWGQGTLVTVSS (SEQ ID NO: 1774) |
| AL2p-54 | QVQLVQSGAEVKKPGSSVKVSCKASGYAFSSHWMNWVRQAPGQGL |
| | EWMGRIYPGEGDTNYAQKFHGRVTITADESTSTAYMELSSLRSEDTA |
| | VYYCARLLRNKPGESYAMDYWGQGTLVTVSS (SEQ ID NO: 1775) |
| AL2p-55, AL2p-56, | EVQLVQSGAEVKKPGSSVKVSCKASGYAFSSHWMNWVRQAPGQGL |
| and AL2p-57 | EWMGRIYPGEGDTNYAQKFHGRVTITADESTSTAYMELSSLRSEDTA |
| | VYYCARLLRNKPGESYAMDYWGQGTLVTVSS (SEQ ID NO: 1776) |
| AL2p-61 | QVQLVQSGAEVKKPGSSVKVSCKASGYAFSSQWMNWVRQAPGQGL |
| | EWMGRIYPGEGDTNYARKFQGRVTITADESTSTAYMELSSLRSEDTA |
| | VYYCARLLRNQPGESYAMDYWGQGTLVTVSS (SEQ ID NO: 1777) |
| AL2p-62 | QVQLVQSGAEVKKPGASVKVSCKASGYAFSSQWMNWVRQAPGQRL |
| | EWIGRIYPGEGDTNYAGKFQGRVTITADTSASTAYMELSSLRSEDTA |
| | VYYCARLLRNQPGESYAMDYWGQGTLVTVSS (SEQ ID NO: 1778) |
| AL2p-h19 and AL2p- | QVQLVQSGAEVKKPGSSVKVSCKASGYAFSSSWMNWVRQAPGQGL |
| h35 | EWMGRIYPGDGDTNYAQKFQGRATITADTSTSTAYMELSSLRSEDTA |
| | VYYCARLLRNQPGESYAMDYWGQGTLVTVSS (SEQ ID NO: 1779) |
| AL2p-h21 | QVQLVQSGAEVKKPGASVKVSCKASGYAFSSSWMNWVRQAPGQGL |
| | EWMGRIYPGDGDTNYAQKFQGRVTMTRDTSTSTVYMELSSLRSEDT |
| | AVYYCARLLRNQPGESYAMDYWGQGTLVTVSS (SEQ ID NO: 1780) |
| AL2p-h22 | QVQLVQSGAEVKKPGASVKVSCKASGYAFSSSWMNWVRQAPGQGL |
| | EWIGRIYPGDGDTNYAQKFQGRVTMTADTSTSTVYMELSSLRSEDTA |
| | VYYCARLLRNQPGESYAMDYWGQGTLVTVSS (SEQ ID NO: 1781) |
| AL2p-h23 | QVQLVQSGAEVKKPGASLKISCKASGYAFSSSWMNWVRQAPGQGLE |
| | WIGRIYPGDGDTNYAQKFQGRATLTADTSTSTAYMELSSLRSEDTAV |
| | YYCARLLRNQPGESYAMDYWGQGALVTVSS (SEQ ID NO: 1782) |
| AL2p-h24 | QVQLVQSGAEVVKPGASLKISCKASGYAFSSSWMNWVRQAPGQGLE |
| | WIGRIYPGDGDTNYNQKFQGRATLTADTSTSTAYMELSSLRSEDTAV |
| | YFCARLLRNQPGESYAMDYWGQGALVTVSS (SEQ ID NO: 1783) |
| AL2p-h25 | QVQLVQSGAEVKKPGASLKISCKASGYAFSSSWMNWVRQAPGQGLE |
| | WIGRIYPGDGDTNYNGEFRVRATLTADTSTSTAYMELSSLRSEDTAV |
| | YYCARLLRNQPGESYAMDYWGQGALVTVSS (SEQ ID NO: 1784) |
| AL2p-h27 | QVQLVQSGAEVKKPGASVKVSCKASGYAFSSSWMNWVRQAPGQGL |
| | EWIGRIYPGDGDTNYNGEFRVRATLTADTSTSTAYMELSSLRSEDTA |
| | VYFCARLLRNQPGESYAMDYWGQGTLVTVSS (SEQ ID NO: 1785) |
| AL2p-h28 | QVQLVQSGAEVKKPGASVKVSCKASGYAFSSSWMNWVRQAPGQGL |
| | EWIGRIYPGDGDTNYAQKFQGRATLTADTSTSTAYMELSSLRSEDTA |
| | VYFCARLLRNQPGESYAMDYWGQGTLVTVSS (SEQ ID NO: 1786) |
| AL2p-h29 | QVQLVQSGAEVKKPGASVKVSCKASGYAFSSSWMNWVRQAPGQGL |
| | EWIGRIYPGDGDTNYAQKFQGRATMTADTSTSTAYMELSSLRSEDTA |
| | VYYCARLLRNQPGESYAMDYWGQGTLVTVSS (SEQ ID NO: 1787) |
| AL2p-h30 | QVQLVQSGAEVKKPGASVKVSCKASGYAFSSSWMNWVRQAPGQGL |
| | EWMGRIYPGDGDTNYAQKFQGRVTMTADTSTSTAYMELSSLRSEDT |
| | AVYYCARLLRNQPGESYAMDYWGQGTLVTVSS (SEQ ID NO: 1788) |
| AL2p-h32 | QVQLVQSGAEVKKPGSSVKVSCKASGYAFSSSWMNWVRQAPGQGL |
| | EWIGRIYPGDGDTNYNGEFRVRATLTADTSTTTAYMELSSLRSEDTA |
| | VYFCARLLRNQPGESYAMDYWGQGTLVTVSS (SEQ ID NO: 1789) |
| AL2p-h33 | QVQLVQSGAEVKKPGSSVKVSCKASGYAFSSSWMNWVRQAPGQGL |
| | EWIGRIYPGDGDTNYAQKFQGRATLTADTSTTTAYMELSSLRSEDTA |
| | VYFCARLLRNQPGESYAMDYWGQGTLVTVSS (SEQ ID NO: 1790) |
| AL2p-h34 | QVQLVQSGAEVKKPGSSVKVSCKASGYAFSSSWMNWVRQAPGQGL |
| | EWIGRIYPGDGDTNYAQKFQGRATITADTSTSTAYMELSSLRSEDTA |
| | VYFCARLLRNQPGESYAMDYWGQGTLVTVSS (SEQ ID NO: 1791) |
| AL2p-b36 | EVQLLESGGGLVQPGGSLRLSCAASGYAFSSSWMNWVRQAPGKGLE |
| | WIGRIYPGDGDTNYAQKFQGRATISADTSKNTAYLQMNSLRAEDTA |
| | VYYCARLLRNQPGESYAMDYWGQGTLVTVSS (SEQ ID NO: 1792) |
| AL2p-h42 and AL2p- | QVQLVQSGAEVKKPGASVKVSCKASGYAFSSSWMNWVRQAPGQRL |
| h59 | EWMGRIYPGDGDTNYAQKFQGRVTITRDTSASTAYMELSSLRSEDTA |
| | VYYCARLLRNQPGESYAMDYWGQGTLVTVSS (SEQ ID NO: 1793) |
| AL2p-h43 | QVQLVQSGAEVKKPGASLKVSCKASGYAFSSSWMNWVRQAPGQRL |
| | EWIGRIYPGDGDTNYNGEFRVRATLTADTSASTAYMELSSLRSEDTA |
| | VYFCARLLRNQPGESYAMDYWGQGTLVTVSS (SEQ ID NO: 1794) |
| AL2p-h44 | QVQLVQSGAEVKKPGASLKVSCKASGYAFSSSWMNWVRQAPGQRL |
| | EWIGRIYPGDGDTNYAQKFQGRATLTADTSASTAYMELSSLRSEDTA |
| | VYFCARLLRNQPGESYAMDYWGQGTLVTVSS (SEQ ID NO: 1795) |
| AL2p-h47 | QVQLVQSGAEVKKPGASVKVSCKASGYAFSSSWMNWVRQAPGQGL |
| | EWMGRIYPGDGDTNYNGEFRVRVTMTRDTSTSTVYMELSSLRSEDT |
| | AVYYCARLLRNQPGESYAMDYWGQGTLVTVSS (SEQ ID NO: 1796) |
| AL2p-h76 | QVQLVQSGAEVKKPGASVKVSCKASGYAFSSSWMNWVRQAPGQRL |
| | EWIGRIYPGDGDTNYAQKFQGRATITADTSASTAYMELSSLRSEDTA |
| | VYFCARLLRNQPGESYAMDYWGQGTLVTVSS (SEQ ID NO: 1797) |
| AL2p-59 | QVQLVQSGAEVKKPGSSVKVSCKASGYAFSSHWMNWVRQAPGQGL |
| | EWMGRIYPGEGQTNYAQKRQGRVTITADESTSTAYMELSSLRSEDTA |
| | VYYCARLLRNQPGESYAMDYWGQGTLVTVSS (SEQ ID NO: 1798) |

TABLE E16
Heavy chain sequences of anti-TREM2 antibodies

| Ab | HC |
|---|---|
| AL2p-58 huIgG1 | QVQLVQSGAEVKKPGASVKVSCKASGYAFSSQWMNWVRQAPGQRLEWI |
| | GRIYPGGGDTNYAGKFQGRVTITADTSASTAYMELSSLRSEDTAVYYCAR |
| | LLRNQPGESYAMDYWGQGTLVTVSSASTKGPSVFPLAPSSKSTSGGTAAL |
| | GCLVKDYFPEPVTVSWNSGALTSGVHTFPAVLQSSGLYSLSSVVTVPSSSL |
| | GTQTYICNVNHKPSNTKVDKKVEPKSCDKTHTCPPCPAPELLGGPSVFLFP |
| | PKPKDTLMISRTPEVTCVVVDVSHEDPEVKFNWYVDGVEVHNAKTKPRE |
| | EQYNSTYRVVSVLTVLHQDWLNGKEYKCKVSNKALPAPIEKTISKAKGQP |
| | REPQVYTLPPSRDELTKNQVSLTCLVKGFYPSDIAVEWESNGQPENNYKT |
| | TPPVLDSDGSFFLYSKLTVDKSRWQQGNVFSCSVMHEALFINHYTQKSLSL |
| | SPGK (SEQ ID NO: 1905) |
| AL2p-58 huIgG1 | QVQLVQSGAEVKKPGASVKVSCKASGYAFSSQWMNWVRQAPGQRLEWI |
| | GRIYPGGGDTNYAGKFQGRVTITADTSASTAYMELSSLRSEDTAVYYCAR |
| | LLRNQPGESYAMDYWGQGTLVTVSSASTKGPSVFPLAPSSKSTSGGTAAL |
| | GCLVKDYFPEPVTVSWNSGALTSGVHTFPAVLQSSGLYSLSSVVTVPSSSL |
| | GTQTYICNVNHKPSNTKVDKKVEPKSCDKTHTCPPCPAPELLGGPSVFLFP |
| | PKPKDTLMISRTPEVTCVVVDVSHEDPEVDGVEVHNAKTKPRE |
| | EQYNSTYRVVSVLTVLHQDWLNGKEYKCKVSNKALPAPIEKTISKAKGQP |
| | REPQVYTLPPSRDELTKNQVSLTCLVKGFYPSDIAVEWESNGQPENNYKT |
| | TPPVLDSDGSFFLYSKLTVDKSRWQQGNVFSCSVMHEALFINHYTQKSLSL |
| | SPG (SEQ ID NO: 1906) |
| AL2p-58 huIgG1 PSEG | QVQLVQSGAEVKKPGASVKVSCKASGYAFSSQWMNWVRQAPGQRLEWI |
| | GRIYPGGGDTNYAGKFQGRVTITADTSASTAYMELSSLRSEDTAVYYCAR |
| | LLRNQPGESYAMDYWGQGTLVTVSSASTKGPSVFPLAPSSKSTSGGTAAL |
| | GCLVKDYFPEPVTVSWNSGALTSGVHTFPAVLQSSGLYSLSSVVTVPSSSL |
| | GTQTYICNVNHKPSNTKVDKKVEPKSCDKTHTCPPCPAPELLGGPSVFLFP |
| | PKPKDTLMISRTPEVTCVVVDVSHEDPEVKFNWYVDGVEVHNAKTKPRE |
| | EQYNSTYRVVSVLTVLHQDWLNGKEYKCKVSNKALPASIEKTISKAKGQP |
| | REPQVYTLPPSRDELTKNQVSLTCLVKGFYPSDIAVEWESNGQPENNYKT |
| | TPPVLD SDGSFFLYSKLTVDKSRWQQGNVFSCSVMHGALFINHYTQKSLSL |
| | SPGK (SEQ ID NO: 1907) |
| AL2p-58 huIgG1 PSEG | QVQLVQSGAEVKKPGASVKVSCKASGYAFSSQWMNWVRQAPGQRLEWI |
| | GRIYPGGGDTNYAGKFQGRVTITADTSASTAYMELSSLRSEDTAVYYCAR |
| | LLRNQPGESYAMDYWGQGTLVTVSSASTKGPSVFPLAPSSKSTSGGTAAL |
| | GCLVKDYFPEPVTVSWNSGALTSGVHTFPAVLQSSGLYSSSVVTVPSSSL |
| | GTQTYICNVNHKPSNTKVDKKVEPKSCDKTHTCPPCPAPELLGGPSVFLFP |
| | PKPKDTLMISRTPEVTCVVVDVSHEDPEVKFNWYVDGVEVHNAKTKPRE |
| | EQYNSTYRVVSVLTVLHQDWLNGKEYKCKVSNKALPASIEKTISKAKGQP |
| | REPQVYTLPPSRDELTKNQVSLTCLVKGFYPSDIAVEWESNGQPENNYKT |
| | TPPVLD SDGSFFLYSKLTVDKSRWQQGNVFSCSVMHGALHNHYTQKSLSL |
| | SPG (SEQ ID NO: 1908) |
| AL2p-47 huIgG1 | QVQLVQSGAEVKKPGSSVKVSCKASGYAFSSDWMNWVRQAPGQGLEW |
| | MGRIYPGEGDTNYARKFHGRVTITADESTSTAYMELSSLRSEDTAVYYCA |
| | RLLRNKPGESYAMDYWGQGTLVTVSSASTKGPSVFPLAPSSKSTSGGTAA |
| | LGCLVKDYFPEPVTVSWNSGALTSGVHTFPAVLQSSGLYSLSSVVTVPSSS |
| | LGTQTYICNVNHKPSNTKVDKKVEPKSCDKTHTCPPCPAPELLGGPSVFLF |
| | PPKPKDTLMISRTPEVTCVVVDVSHEDPEVKFNWYVDGVEVHNAKTKPR |
| | EEQYNSTYRVVSVLTVLHQDWLNGKEYKCKVSNKALPAPIEKTISKAKGQ |
| | PREPQVYTLPPSRDELTKNQVSLTCLVKGFYPSDIAVEWESNGQPENNYKT |
| | TPPVLDSDGSFFLYSKLTVDKSRWQQGNVFSCSVMHEALHNHYTQKSLSL |
| | SPGK (SEQ ID NO: 1909) |
| AL2p-47 hulgG1 | QVQLVQSGAEVKKPGSSVKVSCKASGYAFSSDWMNWVRQAPGQGLEW |
| | MGRIYPGEGDTNYARKFHGRVTITADESTSTAYMELSSLRSEDTAVYYCA |
| | RLLRNKPGESYAMDYWGQGTLVTVSSASTKGPSVFPLAPSSKSTSGGTAA |
| | LGCLVKDYFPEPVTVSWNSGALTSGVHTFPAVLQSSGLYSLSSVVTVPSSS |
| | LGTQTYICNVNHKPSNTKVDKKVEPKSCDKTHTCPPCPAPELLGGPSVFLF |
| | PPKPKDTLMISRTPEVTCVVVDVSHEDPEVKFNWYVDGVEVHNAKTKPR |
| | EEQYNSTYRVVSVLTVLHQDWLNGKEYKCKVSNKALPAPIEKTISKAKGQ |
| | PREPQVYTLPPSRDELTKNQVSLTCLVKGFYPSDIAVEWESNGQPENNYKT |
| | TPPVLD SDGSFFLYSKLTVDKSRWQQGNVFSCSVMHEALHNHYTQKSLSL |
| | SPG (SEQ ID NO: 1910) |
| AL2p-47 huIgG1 PSEG | QVQLVQSGAEVKKPGSSVKVSCKASGYAFSSDWMNWVRQAPGQGLEW |
| | MGRIYPGEGDTNYARKFHGRVTITADESTSTAYMELSSLRSEDTAVYYCA |
| | RLLRNKPGESYAMDYWGQGTLVTVSSASTKGPSVFPLAPSSKSTSGGTAA |
| | LGCLVKDYFPEPVTVSWNSGALTSGVHTFPAVLQSSGLYSLSSVVTVPSSS |
| | LGTQTYICNVNF1KPSNTKVDKKVEPKSCDKTHTCPPCPAPELLGGPSVFLF |
| | PPKPKDTLMISRTPEVTCVVVDVSHEDPEVKFNWYVDGVEVHNAKTKPR |
| | EEQYNSTYRVVSVLTVLHQDWLNGKEYKCKVSNKALPASIEKTISKAKGQ |
| | PREPQVYTLPPSRDELTKNQVSLTCLVKGFYPSDIAVEWESNGQPENNYKT |
| | TPPVLDSDGSFFLYSKLTVDKSRWQQGNVFSCSVMHGALFINHYTQKSLSL |
| | SPGK (SEQ ID NO: 1911) |
| AL2p-47 huIgG1 PSEG | QVQLVQSGAEVKKPGSSVKVSCKASGYAFSSDWMNWVRQAPGQGLEW |
| | MGRIYPGEGDTNYARKFHGRVTITADESTSTAYMELSSLRSEDTAVYYCA |
| | RLLRNKPGESYAMDYWGQGTLVTVSSASTKGPSVFPLAPSSKSTSGGTAA |
| | LGCLVKDYFPEPVTVSWNSGALTSGVHTFPAVLQSSGLYSLSSVVTVPSSS |
| | LGTQTYICNVNFIKPSNTKVDKKVEPKSCDKTHTCPPCPAPELLGGPSVFLF |
| | PPKPKDTLMISRTPEVTCVVVDVSHEDPEVKFNWYVDGVEVHNAKTKPR |
| | EEQYNSTYRVVSVLTVLHQDWLNGKEYKCKVSNKALPASIEKTISKAKGQ |
| | PREPQVYTLPPSRDELTKNQVSLTCLVKGFYPSDIAVEWESNGQPENNYKT |
| | TPPVLDSDGSFFLYSKLTVDKSRWQQGNVFSCSVMHGALFINHYTQKSLSL |
| | SPG (SEQ ID NO: 1912) |
| AL2p-61 hulgG1 | QVQLVQSGAEVKKPGSSVKVSCKASGYAFSSQWMNWVRQAPGQGLEW |
| | MGRIYPGEGDTNYARKFQGRVTITADESTSTAYMELSSLRSEDTAVYYCA |
| | RLLRNQPGESYAMDYWGQGTLVTVSSASTKGPSVFPLAPSSKSTSGGTAA |
| | LGCLVKDYFPEPVTVSWNSGALTSGVHTFPAVLQSSGLYSLSSVVTVPSSS |
| | LGTQTYICNVNHKPSNTKVDKKVEPKSCDKTHTCPPCPAPELLGGPSVFLFPPK |
| | PKDTLMISRTPEVCVVVDVSHEDPEVKFNWYVDGVEVHNAKTKPREEQYNS |
| | TYRVVSVLTVLHQDWLNGKEYKCKVSNKALPAPIEKTISKAKGQPREPQVYTL |
| | PPSRDELTKNQVSLTCLVKGFYPSDIAVEWESNGQPENNYKTTPPVLDSDGSFF |
| | LYSKLTVDKSRWQQGNVFSCSVMHEALHNHYTQKSLSLSPGK |
| | (SEQ ID NO: 1913) |
| AL2p-61 guIgG1 | QVQLVQSGAEVKKPGSSVKVSCKASGYAFSSQWMNWVRQAPGQGLEW |
| | MGRIYPGEGDTNYARKFQGRVTITADESTSTAYMELSSLRSEDTAVYYCA |
| | RLLRNQPGESYAMDYWGQGTLVTVSSASTKGPSVFPLAPSSKSTSGGTAA |
| | LGCLVKDYFPEPVTVSWNSGALTSGVHTFPAVLQSSGLYSLSSVVTVPSSS |
| | LGTQTYICNVNFIKPSNTKVDKKVEPKSCDKTHTCPPCPAPELLGGPSVFLF |
| | PPKPKDTLMISRTPEVTCVVVDVSHEDPEVKFNWYVDGVEVHNAKTKPR |
| | EEQYNSTYRVVSVLTVLHQDWLNGKEYKCKVSNKALPAPIEKTISKAKGQ |
| | PREPQVYTLPPSRDELTKNQVSLTCLVKGFYPSDIAVEWESNGQPENNYKT |
| | TPPVLDSDGSFFLYSKLTVDKSRWQQGNVFSCSVMHEALFINHYTQKSLSL |
| | SPG (SEQ ID NO: 1914) |
| AL2p-40 huIgG1 | QVQLVQSGAEVKKPGSSVKVSCKASGYAFSSHWMNWVRQAPGQGLEW |
| | MGRIYPGGGDTNYAQKFRGRVTITADESTSTAYMELSSLRSEDTAVYYCA |
| | RLLRNQPGASYAMDYWGQGTLVTVSSASTKGPSVFPLAPSSKSTSGGTAA |
| | LGCLVKDYFPEPVTVSWNSGALTSGVHTFPAVLQSSGLYSLSSVVTVPSSS |
| | LGTQTYICNVNHKPSNTKVDKKVEPKSCDKTHTCPPCPAPELLGGPSVFLF |
| | PPKPKDTLMISRTPEVTCVVVDVSHEDPEVKFNWYVDGVEVHNAKTKPR |
| | EEQYNSTYRVVSVLTVLHQDWLNGKEYKCKVSNKALPAPIEKTISKAKGQ |
| | PREPQVYTLPPSRDELTKNQVSLTCLVKGFYPSDIAVEWESNGQPENNYKT |
| | TPPVLDSDGSFFLYSKLTVDKSRWQQGNVFSCSVMHEALFINHYTQKSLSL |
| | SPGK (SEQ ID NO: 1915) |
| AL2p-40 huIgG1 | QVQLVQSGAEVKKPGSSVKVSCKASGYAFSSHWMNWVRQAPGQGLEW |
| | MGRIYPGGGDTNYAQKFRGRVTITADESTSTAYMELSSLRSEDTAVYYCA |
| | RLLRNQPGASYAMDYWGQGTLVTVSSASTKGPSVFPLAPSSKSTSGGTAA |
| | LGCLVKDYFPEPVTVSWNSGALTSGVHTFPAVLQSSGLYSLSSVVTVPSSS |
| | LGTQTYICNVNFIKPSNTKVDKKVEPKSCDKTHTCPPCPAPELLGGPSVFLF |
| | PPKPKDTLMISRTPEVTCVVVDVSHEDPEVKFNWYVDGVEVHNAKTKPR |
| | EEQYNSTYRVVSVLTVLHQDWLNGKEYKCKVSNKALPAPIEKTISKAKGQ |
| | PREPQVYTLPPSRDELTKNQVSLTCLVKGFYPSDIAVEWESNGQPENNYKT |
| | TPPVLDSDGSFFLYSKLTVDKSRWQQGNVFSCSVMHEALFINHYTQKSLSL |
| | SPG (SEQ ID NO: 1916) |
| AL2p-44 huIgG1 | QVQLVQSGAEVKKPGSSVKVSCKASGYAFSSHWMNWVRQAPGQGLEW |
| | MGRIYPGGGDTNYARKFRGRVTITADESTSTAYMELSSLRSEDTAVYYCA |
| | RLLRNQPGASYAMDYWGQGTLVTVSSASTKGPSVFPLAPSSKSTSGGTA |
| | ALGCLVKDYFPEPVTVSWNSGALTSGVHTFPAVLQSSGLYSLSSVVTVPS |
| | SSLGTQTYICNVNHKPSNTKVDKKVEPKSCDKTHTCPPCPAPELLGGPSVF |
| | LFPPKPKDTLMISRTPEVTCVVVDVSHEDPEVKFNWYVDGVEVHNAKTK |
| | PREEQYNSTYRVVSVLTVLHQDWLNGKEYKCKVSNKALPAPIEKTISKAK |
| | GQPREPQVYTLPPSRDELTKNQVSLTCLVKGFYPSDIAVEWESNGQPENN |
| | YKTTPPVLDSDGSFFLYSKLTVDKSRWQQGNVFSCSVMHEALFINHYTQK |
| | SLSLSPGK (SEQ ID NO: 1917) |
| AL2p-44 huIgG1 | QVQLVQSGAEVKKPGSSVKVSCKASGYAFSSHWMNWVRQAPGQGLEW |
| | MGRIYPGGGDTNYARKFRGRVTITADESTSTAYMELSSLRSEDTAVYYCA |
| | RLLRNQPGASYAMDYWGQGTLVTVSSASTKGPSVFPLAPSSKSTSGGTAA |
| | LGCLVKDYFPEPVTVSWNSGALTSGVHTFPAVLQSSGLYSLSSVVTVPSSS |
| | LGTQTYICNVNHKPSNTKVDKKVEPKSCDKTHTCPPCPAPELLGGPSVFLF |
| | PPKPKDTLMISRTPEVTCVVVDVSHEDPEVKFNWYVDGVEVHNAKTKPR |
| | EEQYNSTYRVVSVLTVLHQDWLNGKEYKCKVSNKALPAPIEKTISKAKGQ |
| | PREPQVYTLPPSRDELTKNQVSLTCLVKGFYPSDIAVEWESNGQPENNYKT |
| | TPPVLDSDGSFFLYSKLTVDKSRWQQGNVFSCSVMHEALFINHYTQKSLSL |
| | SPG (SEQ ID NO: 1918) |
| AL2p-41 huIgG1 | QVQLVQSGAEVKKPGSSVKVSCKASGYAFSSHWMNWVRQAPGQGLEW |
| | MGRIYPGEGDTNYAQKFRGRVTITADESTSTAYMELSSLRSEDTAVYYCA |
| | RLLRNQPGASYAMDYWGQGTLVTVSSASTKGPSVFPLAPSSKSTSGGTAA |
| | LGCLVKDYFPEPVTVSWNSGALTSGVHTFPAVLQSSGLYSLSSVVTVPSSS |
| | LGTQTYICNVNHKPSNTKVDKKVEPKSCDKTHTCPPCPAPELLGGPSVFLF |
| | PPKPKDTLMISRTPEVTCVVVDVSHEDPEVKFNWYVDGVEVHNAKTKPR |
| | EEQYNSTYRVVSVLTVLHQDWLNGKEYKCKVSNKALPAPIEKTISKAKGQ |
| | PREPQVYTLPPSRDELTKNQVSLTCLVKGFYPSDIAVEWESNGQPENNYKT |
| | TPPVLDSDGSFFLYSKLTVDKSRWQQGNVFSCSVMHEALFINHYTQKSLSL |
| | SPGK (SEQ ID NO: 1919) |
| AL2p-41 huIgG1 | QVQLVQSGAEVKKPGSSVKVSCKASGYAFSSHWMNWVRQAPGQGLEW |
| | MGRIYPGEGDTNYAQKFRGRVTITADESTSTAYMELSSLRSEDTAVYYCA |
| | RLLRNQPGASYAMDYWGQGTLVTVSSASTKGPSVFPLAPSSKSTSGGTAA |
| | LGCLVKDYFPEPVTVSWNSGALTSGVHTFPAVLQSSGLYSLSSVVTVPSSS |
| | LGTQTYICNVNHKPSNTKVDKKVEPKSCDKTHTCPPCPAPELLGGPSVFLF |
| | PPKPKDTLMISRTPEVTCVVVDVSHEDPEVKFNWYVDGVEVHNAKTKPR |
| | EEQYNSTYRVVSVLTVLHQDWLNGKEYKCKVSNKALPAPIEKTISKAKGQ |
| | PREPQVYTLPPSRDELTKNQVSLTCLVKGFYPSDIAVEWESNGQPENNYKT |
| | TPPVLDSDGSFFLYSKLTVDKSRWQQGNVFSCSVMHEALFINHYTQKSLSL |
| | SPG (SEQ ID NO: 1920) |

TABLE E17
Light chain variable region sequences of anti-TREM2 antibodies

| Ab | LCVR |
|---|---|
| AL2p-h50, AL2p-2, AL2p-3, AL2p- | DVVMTQTPLSLSVTPGQPASISCRSSQSLVHSNGYTYLHWYL |
| 4, AL2p-h42, AL2p-h43, AL2p-h44, | QKPGQSPQLLIYKVSNRFSGVPDRFSGSGSGTDFTLKISRVEA |
| and AL2p-h47 | EDVGVYYCSQSTRVPYTFGQGTKLEIK (SEQ ID NO: 1799) |
| AL2p-5 | DVVMTQTPLSLSVTPGQPASISCRSSQSLVHSNRYTYLHWYL |
| | QKPGQSPQLLIYKVSNRFSGVPDRFSGSGSGTDFTLKISRVEA |
| | EDVGVYYCSQSTRVPYTFGQGTKLEIK (SEQ ID NO: 1800) |
| AL2p-6 | DVVMTQTPLSLSVTPGQPASISCRSSQSLVHSNWYTYLHWYL |
| | QKPGQSPQLLIYKVSNRFSGVPDRFSGSGSGTDFTLKISRVEA |
| | EDVGVYYCSQSTRVPYTFGQGTKLEIK (SEQ ID NO: 1801) |
| AL2p-7, AL2p-8, AL2p-13, and | GVVMTQTPLSLSVTPGQPASISCRSSQSLIHSNGYTYLHWYL |
| AL2p-26 | QKPGQSPQLLIYKVSNRRSGVPDRFSGSGSGTDFTLKISRVEA |
| | EDVGVYYCSQSTRVPYTFGQGTKLEIK (SEQ ID NO: 1802) |
| AL2p-9, AL2p-16, AL2p-18, AL2p- | GVVMTQTPLSLSVTPGQPASISCRTSQSLVHSNGYTYLHWYL |
| 20, AL2p-23, AL2p-25, and AL2p- | QKPGQSPQLLIYKVSNRVSGVPDRFSGSGSGTDFTLKISRVEA |
| 28 | EDVGVYYCSQSTRVPYTFGQGTKLEIK (SEQ ID NO: 1803) |
| AL2p-10, AL2p-12, AL2p-31, and | GVVMTQTPLSLSVTPGQPASISCRSSQSLVHSNGYTYLHWYL |
| AL2p-32 | QKPGQSPQLLIYKVSNRRSGVPDRFSGSGSGTDFTLKISRVEA |
| | EDVGVYYCSQSTRVPYTFGQGTKLEIK (SEQ ID NO: 1804) |
| AL2p-11, AL2p-17, and AL2p-19 | DVVMTQTPLSLSVTPGQPASISCRSSRSLVHSNGYTYLHWYL |
| | QKPGQSPQLLIYKVSNRVSGVPDRFSGSGSGTDFTLKISRVEA |
| | EDVGVYYCSQSTRVPYTFGQGTKLEIK (SEQ ID NO: 1805) |
| AL2p-14, AL2p-24, and AL2p-29 | GVVMTQTPLSLSVTPGQPASISCRSSRSLVHSNGYTYLHWYL |
| | QKPGQSPQLLIYKVSNRFSGVPDRFSGSGSGTDFTLKISRVEAE |
| | DVGVYYCSQSTRVPYTFGQGTKLEIK (SEQ ID NO: 1806) |
| AL2p-15, AL2p-21, and AL2p-30 | GVVMTQTPLSLSVTPGQPASISCRSSSSLVHSNGYTYLHWYL |
| | QKPGQSPQLLIYKVSNRKSGVPDRFSGSGSGTDFTLKISRVEA |
| | EDVGVYYCSQSTRVPYTFGQGTKLEIK (SEQ ID NO: 1807) |
| AL2p-22 | GVVMTQTPLSLSVTPGQPASISCRSSRSLVHSNGYTYLHWYL |
| | QKPGQSPQLLIYKVSNRRSGVPDRFSGSGSGTDFTLKISRVEA |
| | EDVGVYYCSQSTRVPYTFGQGTKLEIK (SEQ ID NO: 1808) |
| AL2p-27 | GVVMTQTPLSLSVTPGQPASISCRSSRSLVHSNGYTYLHWYL |
| | QKPGQSPQLLIYKVSNRVSGVPDRFSGSGSGTDFTLKISRVEA |
| | EDVGVYYCSQSTRVPYTFGQGTKLEIK (SEQ ID NO: 1809) |
| AL2p-33 | GVVMAQTPLSLSVTPGQPASISCRTSQSLVHSNGYTYLHWY |
| | LQKPGQSPQLLIYKVSNRVSGVPDRFSGSGSGTDFTLKISRVE |
| | AEDVGVYYCSQSTRVPYTFGQGTKLEIK (SEQ ID NO: 1810) |
| AL2p-h77, AL2p-35, AL2p-36, | DVVMTQSPDSLAVSLGERATINCRSSQSLVHSNGYTYLHWY |
| AL2p-37, and AL2p-h76 | QQKPGQSPKLLIYKVSNRFSGVPDRFSGSGSGTDFTLTISSLQ |
| | AEDVAVYYCSQSTRVPYTFGGGTKVEIK (SEQ ID NO: 1811) |
| AL2p-38 and AL2p-43 | GVVMTQTPLSLSVTPGQPASISCRSSRSLVHSNRYTYLHWYL |
| | QKPGQSPQLLIYKVSNRRSGVPDRFSGSGSGTDFTLKISRVEA |
| | EDVGVYYCSQSTRVPYTFGQGTKLEIK (SEQ ID NO: 1812) |
| AL2p-39 and AL2p-41 | GVVMTQTPLSLSVTPGQPASISCRSSRSLVHSNQYTYLHWYL |
| | QKPGQSPQLLIYKVSNRRSGVPDRFSGSGSGTDFTLKISRVEA |
| | EDVGVYYCSQSTRVPYTFGQGTKLEIK (SEQ ID NO: 1813) |
| AL2p-40, AL2p-42, and AL2p-44 | GVVMTQTPLSLSVTPGQPASISCRTSRSLVHSNRYTYLHWYL |
| | QKPGQSPQLLIYKVSNRRSGVPDRFSGSGSGTDFTLKISRVEA |
| | EDVGVYYCSQSTRVPYTFGQGTKLEIK (SEQ ID NO: 1814) |
| AL2p-45 AL2p-47 AL2p-50 | DVVMTQTPLSLSVTPGQPASISCRTSQSLVHSNAYTYLHWY |
| AL2p-52, AL2p-55, and AL2p-56 | LQKPGQSPQLLIYKVSNRVSGVPDRFSGSGSGTDFTLKISRVE |
| | AEDVGVYYCSQSTRVPYTFGQGTKLEIK (SEQ ID NO: 1815) |
| AL2p-46, AL2p-48, AL2p-49, | DVVMTQTPLSLSVTPGQPASISCRTSQSLVHSNQYTYLHWY |
| AL2p-51, AL2p-53, AL2p-54, and | LQKPGQSPQLLIYKVSNRVSGVPDRFSGSGSGTDFTLKISRVE |
| AL2p-57 | AEDVGVYYCSQSTRVPYTFGQGTKLEIK (SEQ ID NO: 1816) |
| AL2p-61 | GVVMTQTPLSLSVTPGQPASISCRSSQSLVHSNQYTYLHWYL |
| | QKPGQSPQLLIYKVSNRRSGVPDRFSGSGSGTDFTLKISRVEA |
| | EDVGVYYCSQSTRVPYTFGQGTKLEIK (SEQ ID NO: 1817) |
| AL2p-62 | DVVMTQSPDSLAVSLGERATINCRSSQSLVHSNQYTYLHWY |
| | QQKPGQSPKLLIYKVSNRFSGVPDRFSGSGSGTDFTLTISSLQ |
| | AEDVAVYYCSQSTRVPYTFGGGTKVEIK (SEQ ID NO: 1818) |
| AL2p-58 | DVVMTQSPDSLAVSLGERATINCRSSQSLVHSNRYTYLHWY |
| | QQKPGQSPKLLIYKVSNRFSGVPDRFSGSGSGTDFTLKISRVE |
| | AEDVGVYYCSQSTRVPYTFGQGTKLEIK (SEQ ID NO: 1819) |
| AL2p-60 | GVVMTQTPLSLSVTPGQPASISCRSSQSLVHSNRYTYLHWYL |
| | QKPGQSPQLLIYKVSNRRSGVPDRFSGSGSGTDFTLKISRVEA |
| | EDVGVYYCSQSTRVPYTFGQGTKLEIK (SEQ ID NO: 1820) |
| AL2p-h19 | DIVMTQTPLSLSVTPGQPASISCRSSQSLVHSNGYTYLHWYL |
| | QKPGQSPQLLIYKVSNRFSGVPDRFSGSGSGTDFTLKISRVEA |
| | EDVGVYYCSQSTRVPYTFGQGTKLEIK (SEQ ID NO: 1821) |
| AL2p-h21, AL2p-h22, AL2p-h23, | DVVMTQTPLSLSVTPGQPASISCRSSQSLVHSNGYTYLHWYL |
| AL2p-h24, AL2p-h25, AL2p-h26, | QKPGQSPQLLIYKVSNRFSGVPDRFSGSGSGTDFTLKISRVEA |
| AL2p-h27, AL2p-h28, AL2p-h29 | EDLGVYFCSQSTRVPYTFGQGTKLEIK (SEQ ID NO: 1822) |
| AL2p-h30, AL2p-h31, AL2p-h32, | |
| AL2p-h33, AL2p- h34, AL2p-h35, | |
| AL2p-h36 | DIVMTQSPLSLPVTPGEPASISCRSSQSLVHSNGYTYLHWYL |
| AL2p-h59 | QKPGQSPQLLIYKVSNRFSGVPDRFSGSGSGTDFTLKISRVEA |
| | EDVGVYYCSQSTRVPYTFGGGTKVEIK (SEQ ID NO: 1823) |
| AL2p-h90 | DVQMTQSPSSLSASVGDRVTITCRSSQSLVHSNGYTYLHWY |
| | QQKPGKSPKLLIYKVSNRFSGVPSRFSGSGSGTDFTLTISSLQP |
| | EDFATYYCSQSTRVPYTFGGGTKVEIK (SEQ ID NO: 1824) |
| AL2p-59 | GVVMTQTPLSLSVTPGQPASISCRTSQSLVHSNQYTYLHWY |
| | LQKPGQSPQLLIYKVSNRVSGVPDRFSGSGSGTDFTLKISRVE |
| | AEDVGVYYCSQSTRVPYTFGQGTKLEIK (SEQ ID NO: 1825) |

TABLE E18
Light chain sequences of anti-TREM2 antibodies

| Ab | LC |
|---|---|
| AL2p-58 huIgGl, and AL2p-58 | DVVMTQSPDSLAVSLGERATINCRSSQSLVHSNRYTYLH |
| huIgG1 PSEG | WYQQKPGQSPKLLIYKVSNRFSGVPDRFSGSGSGTDFTL |
| | KISRVEAEDVGVYYCSQSTRVPYTFGQGTKLEIKRTVAA |
| | PSVFIFPPSDEQLKSGTASVVCLLNNFYPREAKVQWKVD |
| | NALQSGNSQESVTEQDSKDSTYSLSSTLTLSKADYEKHK |
| | VYACEVTHQGLSSPVTKSFNRGEC (SEQ ID NO: 1921) |
| AL2p-47 huIgGl, and AL2p-47 | DVVMTQTPLSLSVTPGQPASISCRTSQSLVHSNAYTYLH |
| huIgG1 PSEG | WYLQKPGQSPQLLIYKVSNRVSGVPDRFSGSGSGTDFTL |
| | KISRVEAEDVGVYYCSQSTRVPYTFGQGTKLEIKRTVAA |
| | PSVFIFPPSDEQLKSGTASVVCLLNNFYPREAKVQWKVD |
| | NALQSGNSQESVTEQDSKDSTYSLSSTLTLSKADYEKHK |
| | VYACEVTHQGLSSPVTKSFNRGEC (SEQ ID NO: 1922) |
| AL2p-61 huIgG1 | GVVMTQTPLSLSVTPGQPASISCRSSQSLVHSNQYTYLH |
| | WYLQKPGQSPQLLIYKVSNRRSGVPDRFSGSGSGTDFTL |
| | KISRVEAEDVGVYYCSQSTRVPYTFGQGTKLEIKRTVAA |
| | PSVFIFPPSDEQLKSGTASVVCLLNNFYPREAKVQWKVD |
| | NALQSGNSQESVTEQDSKDSTYSLSSTLTLSKADYEKHK |
| | VYACEVTHQGLSSPVTKSFNRGEC (SEQ ID NO: 1923) |
| AL2p-41 huIgG1 | GVVMTQTPLSLSVTPGQPASISCRSSRSLVHSNQYTYLH |
| | WYLQKPGQSPQLLIYKVSNRRSGVPDRFSGSGSGTDFTL |
| | KISRVEAEDVGVYYCSQSTRVPYTFGQGTKLEIKRTVAA |
| | PSVFIFPPSDEQLKSGTASVVCLLNNFYPREAKVQWKVD |
| | NALQSGNSQESVTEQDSKDSTYSLSSTLTLSKADYEKHK |
| | VYACEVTHQGLSSPVTKSFNRGEC (SEQ ID NO: 1924) |
| AL2p-40 huIgG1, and AL2p-44 | GVVMTQTPLSLSVTPGQPASISCRTSRSLVHSNRYTYLH |
| huIgG1 | WYLQKPGQSPQLLIYKVSNRRSGVPDRFSGSGSGTDFTL |
| | KISRVEAEDVGVYYCSQSTRVPYTFGQGTKLEIKRTVAA |
| | PSVFIFPPSDEQLKSGTASVVCLLNNFYPREAKVQWKVD |
| | NALQSGNSQESVTEQDSKDSTYSLSSTLTLSKADYEKHK |
| | VYACEVTHQGLSSPVTKSFNRGEC (SEQ ID NO: 1925) |

[0360] In some embodiments, each of the light chain variable regions and each of the heavy chain variable regions disclosed in TABLES E1-E18 as well as specific combinations thereof and other embodiments of the anti-TREM2 antibody described in the '573 application and herein may be attached to the light chain constant regions (TABLE EN1) and heavy chain constant regions (TABLE EN2) to form complete antibody light and heavy chains, respectively, as further discussed below. Further, each of the generated heavy and light chain sequences may be combined to form a complete antibody structure. It should be understood that the heavy chain and light chain variable regions provided herein can also be attached to other constant domains having different sequences than the exemplary sequences listed herein.

[0361] F. PCT Patent Application Publication No. WO2018/015573A1

[0362] In some embodiments, the TREM2 agonist is an antibody, or antigen binding fragment thereof, that prevents the cleavage of TREM2 as described in PCT Patent Application Publication No. WO2018/015573A1 (“the '573 application”), which is incorporated by reference herein, in its entirety.

[0363] In some embodiments, the TREM2 binding agent comprises an antibody that comprises a light chain variable domain comprising a CDRL1, CDRL2, and CDRL3, and a heavy chain variable domain comprising a CDRH1, CDRH2, and CDRH3 disclosed in the '573 application specification. In some embodiments, the TREM2 binding agent comprises an antibody that comprises a light chain variable domain and a heavy chain variable domain disclosed in the '573 application specification.

[0364] In some embodiments, the antibody is a binding molecule that inhibits (preferably prevents) TREM2 cleavage. More specifically, in the context of the present invention cleavage (i.e. shedding) of the TREM2 ectodomain is inhibited by the binding molecule of the present invention. In some embodiments, the antibody is a binding molecule that inhibits (preferably prevents) TREM2 cleavage and activates TREM2 activity. In some embodiments, the herein provided binding molecule has a binding site within the ectodomain of TREM2, preferably the stalk region of the TREM2 ectodomain.

[0365] In some embodiments, the antibody is:

[0366] (1) an antibody, wherein the heavy chain variable region comprises the sequence of SEQ ID NO:1955 and the light chain variable region comprises the sequence of SEQ ID NO:1965; and wherein the antibody inhibits TREM2 cleavage;

[0367] (2) an antibody, wherein the heavy chain variable region comprises a sequence having at least 85%, preferably at least 90%, more preferably at least 95%, even more preferably at least 98%, and most preferably at least 99% identity to SEQ ID NO:1955, and the light chain variable region comprises a sequence having at least 85%, preferably at least 90%, more preferably at least 95%, even more preferably at least 98%, and most preferably at least 99% identity to SEQ ID NO:1965; and wherein the antibody inhibits TREM2 cleavage;

[0368] (3) an antibody, wherein the CDR1 of the heavy chain variable region comprises the amino acid sequence of SEQ ID NO:1975; the CDR2 of the heavy chain variable region comprises the amino acid sequence of SEQ ID NO:1985; the CDR3 of the heavy chain variable region comprises the amino acid sequence of SEQ ID NO:1995; the CDR1 of the light chain variable region comprises the amino acid sequence of SEQ ID NO:2005; the CDR2 of the light chain variable region comprises the amino acid sequence of SEQ ID NO:2015; and the CDR3 of the light chain variable region comprises the amino acid sequence of SEQ ID NO:2025; and wherein the antibody inhibits TREM2 cleavage; or

[0369] (4) an antibody, wherein the CDR1 of the heavy chain variable region comprises an amino acid sequence having at least 70%, preferably at least 75%, more preferably at least 80%, and most preferably at least 85% identity to SEQ ID NO:1975; the CDR2 of the heavy chain variable region comprises an amino acid sequence having at least 70%, preferably at least 75%, more preferably at least 80%, even more preferably at least 85%, and most preferably at least 90% identity to SEQ ID NO:1985; the CDR3 of the heavy chain variable region comprises an amino acid sequence having at least 70%, preferably at least 75%, more preferably at least 80%, even more preferably at least 85%, and most preferably at least 90% identity to SEQ ID NO:1995; the CDR1 of the light chain variable region comprises an amino acid sequence having at least 70%, preferably at least 75%, more preferably at least 80%, even more preferably at least 85%, and most preferably at least 90% identity to SEQ ID NO:2005; the CDR2 of the light chain variable region comprises an amino acid sequence having at least 60%, preferably 100% identity to SEQ ID NO:2015; and the CDR3 of the light chain variable region comprises an amino acid sequence having at least 70%, preferably at least 75%, more preferably at least 80%, and most preferably at least 85% identity to SEQ ID NO:2025; and wherein the antibody inhibits TREM2 cleavage.

[0370] In some embodiments, the antibody is antibody clone 14D3, which is:

[0371] (1) an antibody, wherein the heavy chain variable region comprises the sequence of SEQ ID NO:1946 and the light chain variable region comprises the sequence of SEQ ID NO:1956; and wherein the antibody inhibits TREM2 cleavage;

[0372] (2) an antibody, wherein the heavy chain variable region comprises a sequence having at least 85% identity to SEQ ID NO:1946, and the light chain variable region comprises a sequence having at least 85% identity to SEQ ID NO:1956; and wherein the antibody inhibits TREM2 cleavage;

[0373] (3) an antibody, wherein the CDR1 of the heavy chain variable region comprises the amino acid sequence of SEQ ID NO:1966; the CDR2 of the heavy chain variable region comprises the amino acid sequence of SEQ ID NO:1976; the CDR3 of the heavy chain variable region comprises the amino acid sequence of SEQ ID NO:1986; the CDR1 of the light chain variable region comprises the amino acid sequence of SEQ ID NO:1996; the CDR2 of the light chain variable region comprises the amino acid sequence of SEQ ID NO:2006; and the CDR3 of the light chain variable region comprises the amino acid sequence of SEQ ID NO:2016; and wherein the antibody inhibits TREM2 cleavage; or

[0374] (4) an antibody, wherein the CDR1 of the heavy chain variable region comprises an amino acid sequence having at least 70% identity to SEQ ID NO:1966; the CDR2 of the heavy chain variable region comprises an amino acid sequence having at least 70% identity to SEQ ID NO:1976; the CDR3 of the heavy chain variable region comprises an amino acid sequence having at least 70% identity to SEQ ID NO:1986; the CDR1 of the light chain variable region comprises an amino acid sequence having at least 70% identity to SEQ ID NO:1996; the CDR2 of the light chain variable region comprises an amino acid sequence having at least 60% identity to SEQ ID NO:2006; and the CDR3 of the light chain variable region comprises an amino acid sequence having at least 70% identity to SEQ ID NO:2016; and wherein the antibody inhibits TREM2 cleavage.

[0375] In some embodiments, the antibody is antibody clone 14D8, which is:

(1) an antibody, wherein the heavy chain variable region comprises the sequence of SEQ ID NO:1947 and the light chain variable region comprises the sequence of SEQ ID NO:1957; and wherein the antibody inhibits TREM2 cleavage;
(2) an antibody, wherein the heavy chain variable region comprises a sequence having at least 85% identity to SEQ ID NO:1947, and the light chain variable region comprises a sequence having at least 85% identity to SEQ ID NO:1957; and wherein the antibody inhibits TREM2 cleavage;
(3) an antibody, wherein the CDR1 of the heavy chain variable region comprises the amino acid sequence of SEQ ID NO:1967; the CDR2 of the heavy chain variable region comprises the amino acid sequence of SEQ ID NO:1977; the CDR3 of the heavy chain variable region comprises the amino acid sequence of SEQ ID NO:1987; the CDR1 of the light chain variable region comprises the amino acid sequence of SEQ ID NO:1997; the CDR2 of the light chain variable region comprises the amino acid sequence of SEQ ID NO:2007; and the CDR3 of the light chain variable region comprises the amino acid sequence of SEQ ID NO:2017; and wherein the antibody inhibits TREM2 cleavage; or
(4) an antibody, wherein the CDR1 of the heavy chain variable region comprises an amino acid sequence having at least 70% identity to SEQ ID NO:1967; the CDR2 of the heavy chain variable region comprises an amino acid sequence having at least 70% identity to SEQ ID NO:1977; the CDR3 of the heavy chain variable region comprises an amino acid sequence having at least 70% identity to SEQ ID NO:1987; the CDR1 of the light chain variable region comprises an amino acid sequence having at least 70% identity to SEQ ID NO:1997; the CDR2 of the light chain variable region comprises an amino acid sequence having at least 60% identity to SEQ ID NO:2007; and the CDR3 of the light chain variable region comprises an amino acid sequence having at least 70% identity to SEQ ID NO:2017; and wherein the antibody inhibits TREM2 cleavage.

[0376] In some embodiments, the antibody is antibody clone 7A12, which is:

[0377] (1) an antibody, wherein the heavy chain variable region comprises the sequence of SEQ ID NO:1948 and the light chain variable region comprises the sequence of SEQ ID NO:1958; and wherein the antibody inhibits TREM2 cleavage;

[0378] (2) an antibody, wherein the heavy chain variable region comprises a sequence having at least 85%, preferably at least 90%, more preferably at least 95%, even more preferably at least 98%, and most preferably at least 99% identity to SEQ ID NO:1948, and the light chain variable region comprises a sequence having at least 85%, preferably at least 90%, more preferably at least 95%, even more preferably at least 98%, and most preferably at least 99% identity to SEQ ID NO:1958; and wherein the antibody inhibits TREM2 cleavage;

[0379] (3) an antibody, wherein the CDR1 of the heavy chain variable region comprises the amino acid sequence of SEQ ID NO:1968; the CDR2 of the heavy chain variable region comprises the amino acid sequence of SEQ ID NO:1978; the CDR3 of the heavy chain variable region comprises the amino acid sequence of SEQ ID NO:1988; the CDR1 of the light chain variable region comprises the amino acid sequence of SEQ ID NO:1998; the CDR2 of the light chain variable region comprises the amino acid sequence of SEQ ID NO:2008; and the CDR3 of the light chain variable region comprises the amino acid sequence of SEQ ID NO:2018; and wherein the antibody inhibits TREM2 cleavage; or

[0380] (4) an antibody, wherein the CDR1 of the heavy chain variable region comprises an amino acid sequence having at least 70%, preferably at least 75%, more preferably at least 80%, and most preferably at least 85% identity to SEQ ID NO:1968; the CDR2 of the heavy chain variable region comprises an amino acid sequence having at least 70%, preferably at least 75%, more preferably at least 80%, even more preferably at least 85%, and most preferably at least 90% identity to SEQ ID NO:1978; the CDR3 of the heavy chain variable region comprises an amino acid sequence having at least 70%, preferably at least 75%, more preferably at least 80%, even more preferably at least 85%, and most preferably at least 90% identity to SEQ ID NO:1988; the CDR1 of the light chain variable region comprises an amino acid sequence having at least 70%, preferably at least 75%, more preferably at least 80%, even more preferably at least 85%, and most preferably at least 90% identity to SEQ ID NO:1998; the CDR2 of the light chain variable region comprises an amino acid sequence having at least 60%, preferably 100% identity to SEQ ID NO:2008; and the CDR3 of the light chain variable region comprises an amino acid sequence having at least 70%, preferably at least 75%, more preferably at least 80%, and most preferably at least 85% identity to SEQ ID NO:2018; and wherein the antibody inhibits TREM2 cleavage.

[0381] In some embodiments, the antibody is antibody clone 8A11, which is:

[0382] (1) an antibody, wherein the heavy chain variable region comprises the sequence of SEQ ID NO:1949 and the light chain variable region comprises the sequence of SEQ ID NO:1959; and wherein the antibody inhibits TREM2 cleavage;

[0383] (2) an antibody, wherein the heavy chain variable region comprises a sequence having at least 85%, preferably at least 90%, more preferably at least 95%, even more preferably at least 98%, and most preferably at least 99% identity to SEQ ID NO:1949, and the light chain variable region comprises a sequence having at least 85%, preferably at least 90%, more preferably at least 95%, even more preferably at least 98%, and most preferably at least 99% identity to SEQ ID NO:1959; and wherein the antibody inhibits TREM2 cleavage;

[0384] (3) an antibody, wherein the CDR1 of the heavy chain variable region comprises the amino acid sequence of SEQ ID NO:1969; the CDR2 of the heavy chain variable region comprises the amino acid sequence of SEQ ID NO:1979; the CDR3 of the heavy chain variable region comprises the amino acid sequence of SEQ ID NO:1989; the CDR1 of the light chain variable region comprises the amino acid sequence of SEQ ID NO:1999; the CDR2 of the light chain variable region comprises the amino acid sequence of SEQ ID NO:2009; and the CDR3 of the light chain variable region comprises the amino acid sequence of SEQ ID NO:2019; and wherein the antibody inhibits TREM2 cleavage; or

[0385] (4) an antibody, wherein the CDR1 of the heavy chain variable region comprises an amino acid sequence having at least 70%, preferably at least 75%, more preferably at least 80%, and most preferably at least 85% identity to SEQ ID NO:1969; the CDR2 of the heavy chain variable region comprises an amino acid sequence having at least 70%, preferably at least 75%, more preferably at least 80%, even more preferably at least 85%, and most preferably at least 90% identity to SEQ ID NO:1979; the CDR3 of the heavy chain variable region comprises an amino acid sequence having at least 70%, preferably at least 75%, more preferably at least 80%, even more preferably at least 85%, and most preferably at least 90% identity to SEQ ID NO:1989; the CDR1 of the light chain variable region comprises an amino acid sequence having at least 70%, preferably at least 75%, more preferably at least 80%, even more preferably at least 85%, and most preferably at least 90% identity to SEQ ID NO:1999; the CDR2 of the light chain variable region comprises an amino acid sequence having at least 60%, preferably 100% identity to SEQ ID NO:2009; and the CDR3 of the light chain variable region comprises an amino acid sequence having at least 70%, preferably at least 75%, more preferably at least 80%, and most preferably at least 85% identity to SEQ ID NO:2019; and wherein the antibody inhibits TREM2 cleavage.

[0386] In some embodiments, the antibody is antibody clone 21A3, which is:

[0387] (1) an antibody, wherein the heavy chain variable region comprises the sequence of SEQ ID NO:1950 and the light chain variable region comprises the sequence of SEQ ID NO:1960; and wherein the antibody inhibits TREM2 cleavage;

[0388] (2) an antibody, wherein the heavy chain variable region comprises a sequence having at least 85%, preferably at least 90%, more preferably at least 95%, even more preferably at least 98%, and most preferably at least 99% identity to SEQ ID NO:1950, and the light chain variable region comprises a sequence having at least 85%, preferably at least 90%, more preferably at least 95%, even more preferably at least 98%, and most preferably at least 99% identity to SEQ ID NO:1960; and wherein the antibody inhibits TREM2 cleavage;

[0389] (3) an antibody, wherein the CDR1 of the heavy chain variable region comprises the amino acid sequence of SEQ ID NO:1970; the CDR2 of the heavy chain variable region comprises the amino acid sequence of SEQ ID NO:1980; the CDR3 of the heavy chain variable region comprises the amino acid sequence of SEQ ID NO:1990; the CDR1 of the light chain variable region comprises the amino acid sequence of SEQ ID NO:2000; the CDR2 of the light chain variable region comprises the amino acid sequence of SEQ ID NO:2010; and the CDR3 of the light chain variable region comprises the amino acid sequence of SEQ ID NO:2020; and wherein the antibody inhibits TREM2 cleavage; or

[0390] (4) an antibody, wherein the CDR1 of the heavy chain variable region comprises an amino acid sequence having at least 70%, preferably at least 75%, more preferably at least 80%, and most preferably at least 85% identity to SEQ ID NO:1970; the CDR2 of the heavy chain variable region comprises an amino acid sequence having at least 70%, preferably at least 75%, more preferably at least 80%, even more preferably at least 85%, and most preferably at least 90% identity to SEQ ID NO:1980; the CDR3 of the heavy chain variable region comprises an amino acid sequence having at least 70%, preferably at least 75%, more preferably at least 80%, even more preferably at least 85%, and most preferably at least 90% identity to SEQ ID NO:1990; the CDR1 of the light chain variable region comprises an amino acid sequence having at least 70%, preferably at least 75%, more preferably at least 80%, even more preferably at least 85%, and most preferably at least 90% identity to SEQ ID NO:2000; the CDR2 of the light chain variable region comprises an amino acid sequence having at least 60%, preferably 100% identity to SEQ ID NO:2010; and the CDR3 of the light chain variable region comprises an amino acid sequence having at least 70%, preferably at least 75%, more preferably at least 80%, and most preferably at least 85% identity to SEQ ID NO:2020; and wherein the antibody inhibits TREM2 cleavage.

[0391] In some embodiments, the antibody is antibody clone 10C3, which is:

[0392] (1) an antibody, wherein the heavy chain variable region comprises the sequence of SEQ ID NO:1951 and the light chain variable region comprises the sequence of SEQ ID NO:1961; and wherein the antibody inhibits TREM2 cleavage;

[0393] (2) an antibody, wherein the heavy chain variable region comprises a sequence having at least 85%, preferably at least 90%, more preferably at least 95%, even more preferably at least 98%, and most preferably at least 99% identity to SEQ ID NO:1951, and the light chain variable region comprises a sequence having at least 85%, preferably at least 90%, more preferably at least 95%, even more preferably at least 98%, and most preferably at least 99% identity to SEQ ID NO:1961; and wherein the antibody inhibits TREM2 cleavage;

[0394] (3) an antibody, wherein the CDR1 of the heavy chain variable region comprises the amino acid sequence of SEQ ID NO:1971; the CDR2 of the heavy chain variable region comprises the amino acid sequence of SEQ ID NO:1981; the CDR3 of the heavy chain variable region comprises the amino acid sequence of SEQ ID NO:1991; the CDR1 of the light chain variable region comprises the amino acid sequence of SEQ ID NO:2001; the CDR2 of the light chain variable region comprises the amino acid sequence of SEQ ID NO:2011; and the CDR3 of the light chain variable region comprises the amino acid sequence of SEQ ID NO:2021; and wherein the antibody inhibits TREM2 cleavage; or

[0395] (4) an antibody, wherein the CDR1 of the heavy chain variable region comprises an amino acid sequence having at least 70%, preferably at least 75%, more preferably at least 80%, and most preferably at least 85% identity to SEQ ID NO:1971; the CDR2 of the heavy chain variable region comprises an amino acid sequence having at least 70%, preferably at least 75%, more preferably at least 80%, even more preferably at least 85%, and most preferably at least 90% identity to SEQ ID NO:1981; the CDR3 of the heavy chain variable region comprises an amino acid sequence having at least 70%, preferably at least 75%, more preferably at least 80%, even more preferably at least 85%, and most preferably at least 90% identity to SEQ ID NO:1991; the CDR1 of the light chain variable region comprises an amino acid sequence having at least 70%, preferably at least 75%, more preferably at least 80%, even more preferably at least 85%, and most preferably at least 90% identity to SEQ ID NO:2001; the CDR2 of the light chain variable region comprises an amino acid sequence having at least 60%, preferably 100% identity to SEQ ID NO:2011; and the CDR3 of the light chain variable region comprises an amino acid sequence having at least 70%, preferably at least 75%, more preferably at least 80%, and most preferably at least 85% identity to SEQ ID NO:2021; and wherein the antibody inhibits TREM2 cleavage.

[0396] In some embodiments, the antibody is antibody clone 18F9, which is:

[0397] (1) an antibody, wherein the heavy chain variable region comprises the sequence of SEQ ID NO:1952 and the light chain variable region comprises the sequence of SEQ ID NO:1962; and wherein the antibody inhibits TREM2 cleavage;

[0398] (2) an antibody, wherein the heavy chain variable region comprises a sequence having at least 85%, preferably at least 90%, more preferably at least 95%, even more preferably at least 98%, and most preferred at least 99% identity to SEQ ID NO:1952, and the light chain variable region comprises a sequence having at least 85%, preferably at least 90%, more preferably at least 95%, even more preferably at least 98%, and most preferably at least 99% identity to SEQ ID NO:1962; and wherein the antibody inhibits TREM2 cleavage;

[0399] (3) an antibody, wherein the CDR1 of the heavy chain variable region comprises the amino acid sequence of SEQ ID NO:1972; the CDR2 of the heavy chain variable region comprises the amino acid sequence of SEQ ID NO:1982; the CDR3 of the heavy chain variable region comprises the amino acid sequence of SEQ ID NO:1992; the CDR1 of the light chain variable region comprises the amino acid sequence of SEQ ID NO:2002; the CDR2 of the light chain variable region comprises the amino acid sequence of SEQ ID NO:2012; and the CDR3 of the light chain variable region comprises the amino acid sequence of SEQ ID NO:2022; and wherein the antibody inhibits TREM2 cleavage; or

[0400] (4) an antibody, wherein the CDR1 of the heavy chain variable region comprises an amino acid sequence having at least 70%, preferably at least 75%, more preferably at least 80%, and most preferably at least 85% identity to SEQ ID NO:1972; the CDR2 of the heavy chain variable region comprises an amino acid sequence having at least 70%, preferably at least 75%, more preferably at least 80%, even more preferably at least 85%, and most preferably at least 90% identity to SEQ ID NO:1982; the CDR3 of the heavy chain variable region comprises an amino acid sequence having at least 70%, preferably at least 75%, more preferably at least 80%, even more preferably at least 85%, and most preferably at least 90% identity to SEQ ID NO:1992; the CDR1 of the light chain variable region comprises an amino acid sequence having at least 70%, preferably at least 75%, more preferably at least 80%, even more preferably at least 85%, and most preferably at least 90% identity to SEQ ID NO:2002; the CDR2 of the light chain variable region comprises an amino acid sequence having at least 60%, preferably 100% identity to SEQ ID NO:2012; and the CDR3 of the light chain variable region comprises an amino acid sequence having at least 70%, preferably at least 75%, more preferably at least 80%, and most preferably at least 85% identity to SEQ ID NO:2022; and wherein the antibody inhibits TREM2 cleavage.

[0401] In some embodiments, the antibody is antibody clone 15C5, which is:

[0402] (1) an antibody, wherein the heavy chain variable region comprises the sequence of SEQ ID NO:1953 and the light chain variable region comprises the sequence of SEQ ID NO:1963; and wherein the antibody inhibits TREM2 cleavage;

[0403] (2) an antibody, wherein the heavy chain variable region comprises a sequence having at least 85%, preferably at least 90%, more preferably at least 95%, even more preferably at least 98%, and most preferably at least 99% identity to SEQ ID NO:1953, and the light chain variable region comprises a sequence having at least 85%, preferably at least 90%, more preferably at least 95%, even more preferably at least 98%, and most preferably at least 99% identity to SEQ ID NO:1963; and wherein the antibody inhibits TREM2 cleavage;

[0404] (3) an antibody, wherein the CDR1 of the heavy chain variable region comprises the amino acid sequence of SEQ ID NO:1973; the CDR2 of the heavy chain variable region comprises the amino acid sequence of SEQ ID NO:1983; the CDR3 of the heavy chain variable region comprises the amino acid sequence of SEQ ID NO:1993; the CDR1 of the light chain variable region comprises the amino acid sequence of SEQ ID NO:2003; the CDR2 of the light chain variable region comprises the amino acid sequence of SEQ ID NO:2013; and the CDR3 of the light chain variable region comprises the amino acid sequence of SEQ ID NO:2023; and wherein the antibody inhibits TREM2 cleavage; or

[0405] (4) an antibody, wherein the CDR1 of the heavy chain variable region comprises an amino acid sequence having at least 70%, preferably at least 75%, more preferably at least 80%, and most preferably at least 85% identity to SEQ ID NO:1973; the CDR2 of the heavy chain variable region comprises an amino acid sequence having at least 70%, preferably at least 75%, more preferably at least 80%, even more preferably at least 85%, and most preferably at least 90% identity to SEQ ID NO:1983; the CDR3 of the heavy chain variable region comprises an amino acid sequence having at least 70%, preferably at least 75%, more preferably at least 80%, even more preferably at least 85%, and most preferably at least 90% identity to SEQ ID NO:1993; the CDR1 of the light chain variable region comprises an amino acid sequence having at least 70%, preferably at least 75%, more preferably at least 80%, even more preferably at least 85%, and most preferably at least 90% identity to SEQ ID NO:2003; the CDR2 of the light chain variable region comprises an amino acid sequence having at least 60%, preferably 100% identity to SEQ ID NO:2013; and the CDR3 of the light chain variable region comprises an amino acid sequence having at least 70%, preferably at least 75%, more preferably at least 80%, and most preferably at least 85% identity to SEQ ID NO:2023; and wherein the antibody inhibits TREM2 cleavage.

[0406] In some embodiments, the antibody is antibody clone 1G6, which is:

[0407] (1) an antibody, wherein the heavy chain variable region comprises the sequence of SEQ ID NO:1954 and the light chain variable region comprises the sequence of SEQ ID NO:1964; and wherein the antibody inhibits TREM2 cleavage;

[0408] (2) an antibody, wherein the heavy chain variable region comprises a sequence having at least 85%, preferably at least 90%, more preferably at least 95%, even more preferably at least 98%, and most preferably at least 99% identity to SEQ ID NO:1954, and the light chain variable region comprises a sequence having at least 85%, preferably at least 90%, more preferably at least 95%, even more preferably at least 98%, and most preferably at least 99% identity to SEQ ID NO:1964; and wherein the antibody inhibits TREM2 cleavage;

[0409] (3) an antibody, wherein the CDR1 of the heavy chain variable region comprises the amino acid sequence of SEQ ID NO:1974; the CDR2 of the heavy chain variable region comprises the amino acid sequence of SEQ ID NO:1984; the CDR3 of the heavy chain variable region comprises the amino acid sequence of SEQ ID NO:1994; the CDR1 of the light chain variable region comprises the amino acid sequence of SEQ ID NO:2004; the CDR2 of the light chain variable region comprises the amino acid sequence of SEQ ID NO:2014; and the CDR3 of the light chain variable region comprises the amino acid sequence of SEQ ID NO:2024; and wherein the antibody inhibits TREM2 cleavage; or

[0410] (4) an antibody, wherein the CDR1 of the heavy chain variable region comprises an amino acid sequence having at least 70%, preferably at least 75%, more preferably at least 80%, and most preferably at least 85% identity to SEQ ID NO:1974; the CDR2 of the heavy chain variable region comprises an amino acid sequence having at least 70%, preferably at least 75%, more preferably at least 80%, even more preferably at least 85%, and most preferably at least 90% identity to SEQ ID NO:1984; the CDR3 of the heavy chain variable region comprises an amino acid sequence having at least 70%, preferably at least 75%, more preferably at least 80%, even more preferably at least 85%, and most preferably at least 90% identity to SEQ ID NO:1994; the CDR1 of the light chain variable region comprises an amino acid sequence having at least 70%, preferably at least 75%, more preferably at least 80%, even more preferably at least 85%, and most preferably at least 90% identity to SEQ ID NO:2004; the CDR2 of the light chain variable region comprises an amino acid sequence having at least 60%, preferably 100% identity to SEQ ID NO:2014; and the CDR3 of the light chain variable region comprises an amino acid sequence having at least 70%, preferably at least 75%, more preferably at least 80%, and most preferably at least 85% identity to SEQ ID NO:2024; and wherein the antibody inhibits TREM2 cleavage.

[0411] In some embodiments, the antibody is an antibody disclosed in FIG. 9 of PCT Patent Application Publication No. WO2018/015573A1, reproduced below as TABLES F1-F4.

TABLE F1

| Clone name | Variable region of the heavy chain |
|---|---|
| 14D3 | EVKLLEFGGGLVQPGGSMRLSCAASGFTFTDFYMNWIRQPAGRAPEWLGLIR |
| | NKTKGYTTEYNRSVKGRFTISRDNTQNMLYLQMNSLRPEDTATYYCARIGV |
| | NNGGSLDYWGQGVMVTVSS (SEQ ID NO: 1946) |
| 14D8 | EVKLLESGGGLVQPGGSMRLSCAASGFTFTDFYMNWIRQPAGKAPEWLGLIR |
| | NKANGYTTVYNPSVKGRFTISRDNTQNMLYLQMNTLRGEDTATYYCARIGI |
| | NNGGSLDYWGQGVMVTVSS (SEQ ID NO: 1947) |
| 7A12 | EVKLLESGGGLVQPGGSMRLSCAASGFTFTDFYMNWIRQPAGKAPEWLGLIR |
| | NKANGYTTQYNPSVKGRFTISRDNTQNMLYLQMNTLRGEDTATYYCARIGI |
| | NNGGSLDYWGQGVMVTVSS (SEQ ID NO: 1948) |
| 8A11 | EVKLLESGGGLVQPGGSMRLSCAASGFTFTDFYMNWIRQPAGKAPEWLGLIR |
| | NKTKGYTTEYNTSVKGRFTISRDNTQNMLYLQMNSLRPEDTATYYCARIGV |
| | NNGGSLDYWGQGVMVTVSS (SEQ ID NO: 1949) |
| 21A3 | EVKLLESGGGLVQPGGSMRLSCAASGFTFTDFYMNWIRQPAGKAPEWLGLIR |
| | NKANGYTTQYNPSVKGRFTISRDNTQNMLYLQMNTLRGEDTATYYCARIGI |
| | NNGGSLDYWGQGVMVTVSS (SEQ ID NO: 1950) |
| 10C3 | EVKLLESGGGLVQPGGSMRLSCAASGFTFTDFYMNWIRQPAGETPEWLGLIR |
| | NKTKGYTTEYNPSVKGRFTISRDNTQNMLYLQMNSLRPEDTATYYCARIGTN |
| | NGGSLDYWGQGVMVTVSS (SEQ ID NO: 1951) |
| 18F9 | EVKLLESGGGLVQPGGSMRLSCVVSGFTFTDFYMNWIRQAAGKAPEWLGLI |
| | RNKVNGYRTEYNPSVKGRFTISRDNIQNMLYLQMNTLRAEDTATYYCARIGI |
| | NNGGSLDYWGQGVMVTVSS (SEQ ID NO: 1952) |
| 15C5 | EVKLLESGGGLVQPGGSMRLSCAASGFTFTDFYMNWIRQPAGKAPEWLGLIR |
| | NKAYGYTTEYNPSVKGRFTISRDNTQDMLYLQMNTLRAEDTATYYCARIGIN |
| | YGGSLDYWGQGVMVTVSS (SEQ ID NO: 1953) |
| 1G6 | EVKLLESGGGLVQPGGSLRLSCVASGFTFTDFYMNWIRQPAGKAPEWLGLIR |
| | NKANGFTTEYNPSVKGRFTISRDNTQHMLYLQMNTLRAEDTATYYCARIGIN |
| | NGGSLDYWGQGVMVTVSS (SEQ ID NO: 1954) |
| Consensus | EVKLLESGGGLVQPGGSMRLSCAASGFTFTDFYMNWIRQPAGKAPEWLGLIR |
| sequence | NKANGYTTEYNPSVKGRFTISRDNTQNMLYLQMNTLREDTATYYCARIGINN |
| | GGSLDYWGQGVMVTVSS (SEQ ID NO: 1955) |

TABLE F2

| Clone name | Variable region of the light chain |
|---|---|
| 14D3 | DILIIQSPASLTVSAGARVTMSCKSSQSLLYSENNQDYLAWYQQKPGQFPKLL |
| | IYGASNRHTGVPDRFTGSGSGTDFTLTISSVQAEDLADYYCEQTYSYPYTFGA |
| | GTKLELK (SEQ ID NO: 1956) |
| 14D8 | DILINQSPASLTVSTGEKVTMSCRSSQSLLYSEKNQDYLAWYQQKPGQFPKLL |
| | IYGASYRHTGVPDRFTGSGSGTDFTLTISSVQAEDLADYYCEQTYSYPYTFGA |
| | GTKLELK (SEQ ID NO: 1957) |
| 7Al2 | DILINQSPASLTVSAGEKVTMSCKSSQSLLYSEKNQDYLAWYQQKPGQSPKL |
| | LMYGASYRHTGVPDRFTGSGSGTDFTLTISSVQAEDLADYYCEQTYSYPYTF |
| | GAGTKLELK (SEQ ID NO: 1958) |
| 8A11 | DILIIQSPASLTVSAGARVTMSCKSSQSLLYSENNQDYLAWYQQKPGQFPKLL |
| | IYGASNRHTGVPDRFTGSGSGTDFTLTISSVQAEDLADYYCEQTYSYPYTFGA |
| | GTKLELK (SEQ ID NO: 1959) |
| 21A3 | DILINQSPASLTVSAGEKVTMSCKSSQSLLYSEKNQDYLAWYQQKPGQSPKL |
| | LMYGASYRHTGVPDRFTGSGSGTDFTLTISSVQAEDLADYYCEQTYSYPYTF |
| | GAGTKLELK (SEQ ID NO: 1960) |
| 10C3 | DILIIQSPASLTVSAGARVTMSCKSSQSLLYSENNQDYLAWYQQKPGQFPKLL |
| | IYGASNRHTGVPDRFTGSGSGTDFTLTISSVQAEDLADYYCEQTYSYPYTFGA |
| | GTKLELK (SEQ ID NO: 1961) |
| 18F9 | DILINQSPASLTVSAGEKVTMSCKSSQSLLYSENNQDYLAWYQQKPGQFPKL |
| | LIYGASNRHTGVPDRFTGSGSGTDFTLTISSVQAEDLADYYCEQTYSYPYTFG |
| | AGTKLELK (SEQ ID NO: 1962) |
| 15C5 | DILINQSPASLTVSAGEKVTVSCKSSQSLLYSESNQDYLAWYQQKPGQFPKLL |
| | IYGASYRHTGVPDRFTGSGSGTDFTLTISSVQAEDLAHYYCEQTYSYPYTFGA |
| | GTKLELK (SEQ ID NO: 1963) |
| 1G6 | DILINQSPASLTVSTGEKVTMSCKSSQSLLYSENKQDYLAWYQQKPGQFPKLL |
| | IYGASNRHTGVPDRFTGSGSGTDFTLTINIVQAEDLADYYCEQTYSYPYTFGA |
| | GTKLELK (SEQ ID NO: 1964) |
| Consensus | DILINQSPASLTVSAGEKVTMSCKSSQSLLYSENNQDYLAWYQQKPGQFPKL |
| sequence | LIYGASNRHTGVPDRFTGSGSGTDFTLTISSVQAEDLADYYCEQTYSYPYTFG |
| | AGTKLELK (SEQ ID NO: 1965) |

TABLE F3

| | Complementarity determining regions in the variable | | |
|---|---|---|---|
| | region of the heavy chain | | |
| Clone name | CDR1 | CDR2 | CDR3 |
| 14D3 | GFTFTDFY | IRNKTKGYTT | ARIGVNNGGSLDYWG |
| | (SEQ ID NO: 1966) | (SEQ ID NO: 1976) | (SEQ ID NO: 1986) |
| 14D8 | GFTFTDFY | IRNKANGYTT | ARIGINNGGSLDYWG |
| | (SEQ ID NO: 1967) | (SEQ ID NO: 1977) | (SEQ ID NO: 1987) |
| 7Al2 | GFTFTDFY | IRNKANGYTT | ARIGINNGGSLDYWG |
| | (SEQ ID NO: 1968) | (SEQ ID NO: 1978) | (SEQ ID NO: 1988) |
| 8A11 | GFTFTDFY | IRNKTKGYTT | ARIGVNNGGSLDYWG |
| | (SEQ ID NO: 1969) | (SEQ ID NO: 1979) | (SEQ ID NO: 1989) |
| 21A3 | GFTFTDFY | IRNKANGYTT | ARIGINNGGSLDYWG |
| | (SEQ ID NO: 1970) | (SEQ ID NO: 1980) | (SEQ ID NO: 1990) |
| 10C3 | GFTFTDFY | IRNKTKGYTT | ARIGTNNGGSLDYWG |
| | (SEQ ID NO: 1971) | (SEQ ID NO: 1981) | (SEQ ID NO: 1991) |
| 18F9 | GFTFTDFY | IRNKVNGYRT | ARIGINNGGSLDYWG |
| | (SEQ ID NO: 1972) | (SEQ ID NO: 1982) | (SEQ ID NO: 1992) |
| 15C5 | GFTFTDFY | IRNKAYGYTT | ARIGINYGGSLDYWG |
| | (SEQ ID NO: 1973) | (SEQ ID NO: 1983) | (SEQ ID NO: 1993) |
| 1G6 | GFTFTDFY | IRNKANGFTT | ARIGINNGGSLDYWG |
| | (SEQ ID NO: 1974) | (SEQ ID NO: 1984) | (SEQ ID NO: 1994) |
| Consensus | GFTFTDFY | IRNKANGYTT | ARIGINNGGSLDYWG |
| | (SEQ ID NO: 1975) | (SEQ ID NO: 1985) | (SEQ ID NO: 1995) |

TABLE F4

| | Complementarity determining regions in the variable | | |
|---|---|---|---|
| | region of the light chain | | |
| Clone name | CDR1 | CDR2 | CDR3 |
| 14D3 | QSLLYSENNQDY | GAS (SEQ ID NO: 2006) | EQTYSYPYT |
| | (SEQ ID NO: 1996) | | (SEQ ID NO: 2016) |
| 14D8 | QSLLYSEKNQDY | GAS (SEQ ID NO: 2007) | EQTYSYPYT |
| | (SEQ ID NO: 1997) | | (SEQ ID NO: 2017) |
| 7Al2 | QSLLYSEKNQDY | GAS (SEQ ID NO: 2008) | EQTYSYPYT |
| | (SEQ ID NO: 1998) | | (SEQ ID NO: 2018) |
| 8A11 | QSLLYSENNQDY | GAS (SEQ ID NO: 2009) | EQTYSYPYT |
| | (SEQ ID NO: 1999) | | (SEQ ID NO: 2019) |
| 21A3 | QSLLYSEKNQDY | GAS (SEQ ID NO: 2010) | EQTYSYPYT |
| | (SEQ ID NO: 2000) | | (SEQ ID NO: 2020) |
| 10C3 | QSLLYSENNQDY | GAS (SEQ ID NO: 2011) | EQTYSYPYT |
| | (SEQ ID NO: 2001) | | (SEQ ID NO: 2021) |
| 18F9 | QSLLYSENNQDY | GAS (SEQ ID NO: 2012) | EQTYSYPYT |
| | (SEQ ID NO: 2002) | | (SEQ ID NO: 2022) |
| 15C5 | QSLLYSESNQDY | GAS (SEQ ID NO: 2013) | EQTYSYPYT |
| | (SEQ ID NO: 2003) | | (SEQ ID NO: 2023) |
| 1G6 | QSLLYSENKQDY | GAS (SEQ ID NO: 2014) | EQTYSYPYT |
| | (SEQ ID NO: 2004) | | (SEQ ID NO: 2024) |
| Consensus | QSLLYSENNQDY | GAS (SEQ ID NO: 2015) | EQTYSYPYT |
| | (SEQ ID NO: 2005) | | (SEQ ID NO: 2025) |

[0412] In some embodiments, each of the light chain variable regions and each of the heavy chain variable regions disclosed in in the above tables as well as specific combinations thereof and other embodiments of the anti-TREM2 antibody described in the '573 application and herein may be attached to the light chain constant regions (TABLE EN1) and heavy chain constant regions (TABLE EN2) to form complete antibody light and heavy chains, respectively, as further discussed below. Further, each of the generated heavy and light chain sequences may be combined to form a complete antibody structure. It should be understood that the heavy chain and light chain variable regions provided herein can also be attached to other constant domains having different sequences than the exemplary sequences listed herein.

[0413] G. PCT Patent Application Publication No. WO2019/055841A1

[0414] In some embodiments, the TREM2 agonist is an antibody or an antigen-binding fragment thereof, as described in PCT Patent Application Publication No. WO2019/055841A1 (“the '841 application”), which is incorporated by reference herein, in its entirety.

[0415] In some embodiments, the TREM2 binding agent comprises an antibody that comprises a light chain variable domain comprising a CDRL1, CDRL2, and CDRL3, and a heavy chain variable domain comprising a CDRH1, CDRH2, and CDRH3 disclosed in the '841 application specification. In some embodiments, the TREM2 binding agent comprises an antibody that comprises a light chain variable domain and a heavy chain variable domain disclosed in the '841 application specification.

[0416] In some embodiments, the antibody comprises one or more (e.g., one, two, three, four, five, or all six) CDRs selected from the group consisting of:

[0417] (a) a heavy chain CDR1 sequence having at least 90% sequence identity to the amino acid sequence of any one of SEQ ID NOS:2049, 2077, 2080, 2086, 2092, 2098, 2103, 2109, 2115, 2122, 2126, 2347, and 2355 or having up to two amino acid substitutions relative to the amino acid sequence of any one of SEQ ID NOS:2049, 2077, 2080, 2086, 2092, 2098, 2103, 2109, 2115, 2122, 2126, 2347, and 2355;

[0418] (b) a heavy chain CDR2 sequence having at least 90% sequence identity to the amino acid sequence of any one of SEQ ID NOS:2050, 2078, 2081, 2087, 2093, 2099, 2104, 2110, 2116, 2120, 2123, 2127, 2348, and 2356 or having up to two amino acid substitutions relative to the amino acid sequence of any one of SEQ ID NOS:2050, 2078, 2081, 2087, 2093, 2099, 2104, 2110, 2116, 2120, 2123, 2127, 2348, and 2356;

[0419] (c) a heavy chain CDR3 sequence having at least 90% sequence identity to the amino acid sequence of any one of SEQ ID NOS:2051, 2082, 2088, 2094, 2100, 2105, 2111, 2117, 2124, 2128, 2349, and 2357 or having up to two amino acid substitutions relative to the amino acid sequence of any one of SEQ ID NOS:2051, 2082, 2088, 2094, 2100, 2105, 2111, 2117, 2124, 2128, 2349, and 2357;

[0420] (d) a light chain CDR1 sequence having at least 90% sequence identity to the amino acid sequence of any one of SEQ ID NOS:2052, 2083, 2089, 2095, 2101, 2106, 2112, 2118, 2129, and 2351 or having up to two amino acid substitutions relative to the amino acid sequence of any one of SEQ ID NOS:2052, 2083, 2089, 2095, 2101, 2106, 2112, 2118, 2129, and 2351;

[0421] (e) a light chain CDR2 sequence having at least 90% sequence identity to the amino acid sequence of any one of SEQ ID NOS:2053, 2079, 2084, 2090, 2096, 2107, 2113, 2352, and 2359 or having up to two amino acid substitutions relative to the amino acid sequence of any one of SEQ ID NOS:2053, 2079, 2084, 2090, 2096, 2107, 2113, 2352, and 2359; and

[0422] (f) a light chain CDR3 sequence having at least 90% sequence identity to the amino acid sequence of any one of SEQ ID NOS:2054, 2085, 2091, 2097, 2102, 2108, 2114, 2119, 2121, 2125, 2130, and 2353 or having up to two amino acid substitutions relative to the amino acid sequence of any one of SEQ ID NOS:2054, 2085, 2091, 2097, 2102, 2108, 2114, 2119, 2121, 2125, 2130, and 2353.

[0423] In some embodiments, the antibody comprises:

[0424] (a) a heavy chain CDR1 sequence comprising the amino acid sequence of SEQ ID NO:2049, a heavy chain CDR2 sequence comprising the amino acid sequence of SEQ ID NO:2050, a heavy chain CDR3 sequence comprising the amino acid sequence of SEQ ID NO:2051, a light chain CDR1 sequence comprising the amino acid sequence of SEQ ID NO:2052, a light chain CDR2 sequence comprising the amino acid sequence of SEQ ID NO:2052, and a light chain CDR3 sequence comprising the amino acid sequence of SEQ ID NO:2053; or

[0425] (b) a heavy chain CDR1 sequence comprising the amino acid sequence of SEQ ID NO:2077, a heavy chain CDR2 sequence comprising the amino acid sequence of SEQ ID NO:2078, a heavy chain CDR3 sequence comprising the amino acid sequence of SEQ ID NO:2051, a light chain CDR1 sequence comprising the amino acid sequence of SEQ ID NO:2052, a light chain CDR2 sequence comprising the amino acid sequence of SEQ ID NO:2079, and a light chain CDR3 sequence comprising the amino acid sequence of SEQ ID NO:2054; or

[0426] (c) a heavy chain CDR1 sequence comprising the amino acid sequence of SEQ ID NO:2080, a heavy chain CDR2 sequence comprising the amino acid sequence of SEQ ID NO:2081, a heavy chain CDR3 sequence comprising the amino acid sequence of SEQ ID NO:2082, a light chain CDR1 sequence comprising the amino acid sequence of SEQ ID NO:2083, a light chain CDR2 sequence comprising the amino acid sequence of SEQ ID NO:2084, and a light chain CDR3 sequence comprising the amino acid sequence of SEQ ID NO:2085; or

[0427] (d) a heavy chain CDR1 sequence comprising the amino acid sequence of SEQ ID NO:2086, a heavy chain CDR2 sequence comprising the amino acid sequence of SEQ ID NO:2087, a heavy chain CDR3 sequence comprising the amino acid sequence of SEQ ID NO:2088, a light chain CDR1 sequence comprising the amino acid sequence of SEQ ID NO:2089, a light chain CDR2 sequence comprising the amino acid sequence of SEQ ID NO:2090, and a light chain CDR3 sequence comprising the amino acid sequence of SEQ ID NO:2091; or

[0428] (e) a heavy chain CDR1 sequence comprising the amino acid sequence of SEQ ID NO:2092, a heavy chain CDR2 sequence comprising the amino acid sequence of SEQ ID NO:2093, a heavy chain CDR3 sequence comprising the amino acid sequence of SEQ ID NO:2094, a light chain CDR1 sequence comprising the amino acid sequence of SEQ ID NO:2095, a light chain CDR2 sequence comprising the amino acid sequence of SEQ ID NO:2096, and a light chain CDR3 sequence comprising the amino acid sequence of SEQ ID NO:2097; or (f) a heavy chain CDR1 sequence comprising the amino acid sequence of SEQ ID NO:2098, a heavy chain CDR2 sequence comprising the amino acid sequence of SEQ ID NO:2099, a heavy chain CDR3 sequence comprising the amino acid sequence of SEQ ID NO:2100, a light chain CDR1 sequence comprising the amino acid sequence of SEQ ID NO:2101, a light chain CDR2 sequence comprising the amino acid sequence of SEQ ID NO:2079, and a light chain CDR3 sequence comprising the amino acid sequence of SEQ ID NO:2102; or

[0429] (g) a heavy chain CDR1 sequence comprising the amino acid sequence of SEQ ID NO:2103, a heavy chain CDR2 sequence comprising the amino acid sequence of SEQ ID NO:2104, a heavy chain CDR3 sequence comprising the amino acid sequence of SEQ ID NO:2105, a light chain CDR1 sequence comprising the amino acid sequence of SEQ ID NO:2106, a light chain CDR2 sequence comprising the amino acid sequence of SEQ ID NO:2107, and a light chain CDR3 sequence comprising the amino acid sequence of SEQ ID NO:2108; or

[0430] (h) a heavy chain CDR1 sequence comprising the amino acid sequence of SEQ ID NO:2109, a heavy chain CDR2 sequence comprising the amino acid sequence of SEQ ID NO:2110, a heavy chain CDR3 sequence comprising the amino acid sequence of SEQ ID NO:2111, a light chain CDR1 sequence comprising the amino acid sequence of SEQ ID NO:2112, a light chain CDR2 sequence comprising the amino acid sequence of SEQ ID NO:2113, and a light chain CDR3 sequence comprising the amino acid sequence of SEQ ID NO:2114; or

[0431] (i) a heavy chain CDR1 sequence comprising the amino acid sequence of SEQ ID NO:2115, a heavy chain CDR2 sequence comprising the amino acid sequence of SEQ ID NO:2116, a heavy chain CDR3 sequence comprising the amino acid sequence of SEQ ID NO:2117, a light chain CDR1 sequence comprising the amino acid sequence of SEQ ID NO:2118, a light chain CDR2 sequence comprising the amino acid sequence of SEQ ID NO:2119, and a light chain CDR3 sequence comprising the amino acid sequence of SEQ ID NO:2119; or

[0432] (j) a heavy chain CDR1 sequence comprising the amino acid sequence of SEQ ID NO:2115, a heavy chain CDR2 sequence comprising the amino acid sequence of SEQ ID NO:2120, a heavy chain CDR3 sequence comprising the amino acid sequence of SEQ ID NO:2117, a light chain CDR1 sequence comprising the amino acid sequence of SEQ ID NO:2118, a light chain CDR2 sequence comprising the amino acid sequence of SEQ ID NO:2079, and a light chain CDR3 sequence comprising the amino acid sequence of SEQ ID NO:2121; or

[0433] (k) a heavy chain CDR1 sequence comprising the amino acid sequence of SEQ ID NO:2123, a heavy chain CDR2 sequence comprising the amino acid sequence of SEQ ID NO:2132, a heavy chain CDR3 sequence comprising the amino acid sequence of SEQ ID NO:2133, a light chain CDR1 sequence comprising the amino acid sequence of SEQ ID NO:2102, a light chain CDR2 sequence comprising the amino acid sequence of SEQ ID NO:2079, and a light chain CDR3 sequence comprising the amino acid sequence of SEQ ID NO:2125; or

[0434] (l) a heavy chain CDR1 sequence comprising the amino acid sequence of SEQ ID NO:2126, a heavy chain CDR2 sequence comprising the amino acid sequence of SEQ ID NO:2127, a heavy chain CDR3 sequence comprising the amino acid sequence of SEQ ID NO:2128, a light chain CDR1 sequence comprising the amino acid sequence of SEQ ID NO:2129, a light chain CDR2 sequence comprising the amino acid sequence of SEQ ID NO:2079, and a light chain CDR3 sequence comprising the amino acid sequence of SEQ ID NO:2130; or

[0435] (m) a heavy chain CDR1 sequence comprising the amino acid sequence of SEQ ID NO:2347, a heavy chain CDR2 sequence comprising the amino acid sequence of SEQ ID NO:2348, a heavy chain CDR3 sequence comprising the amino acid sequence of SEQ ID NO:2349, a light chain CDR1 sequence comprising the amino acid sequence of SEQ ID NO:2351, a light chain CDR2 sequence comprising the amino acid sequence of SEQ ID NO:2352, and a light chain CDR3 sequence comprising the amino acid sequence of SEQ ID NO:2353; or

[0436] (n) a heavy chain CDR1 sequence comprising the amino acid sequence of SEQ ID NO:2355, a heavy chain CDR2 sequence comprising the amino acid sequence of SEQ ID NO:2356, a heavy chain CDR3 sequence comprising the amino acid sequence of SEQ ID NO:2357, a light chain CDR1 sequence comprising the amino acid sequence of SEQ ID NO:2089, a light chain CDR2 sequence comprising the amino acid sequence of SEQ ID NO:2359, and a light chain CDR3 sequence comprising the amino acid sequence of SEQ ID NO:2091.

[0437] In some embodiments, the antibody or antigen-binding portion thereof comprises:

[0438] (a) a heavy chain variable region comprising an amino acid sequence that has at least 90% sequence identity to SEQ ID NO:2047; and a light chain variable region comprising an amino acid sequence that has at least 90% sequence identity to SEQ ID NO:2048; or

[0439] (b) a heavy chain variable region comprising an amino acid sequence that has at least 90% sequence identity to SEQ ID NO:2055; and a light chain variable region comprising an amino acid sequence that has at least 90% sequence identity to SEQ ID NO:2066; or

[0440] (c) a heavy chain variable region comprising an amino acid sequence that has at least 90% sequence identity to SEQ ID NO:2056; and a light chain variable region comprising an amino acid sequence that has at least 90% sequence identity to SEQ ID NO:2067; or

[0441] (d) a heavy chain variable region comprising an amino acid sequence that has at least 90% sequence identity to SEQ ID NO:2057; and a light chain variable region comprising an amino acid sequence that has at least 90% sequence identity to SEQ ID NO:2068; or

[0442] (e) a heavy chain variable region comprising an amino acid sequence that has at least 90% sequence identity to SEQ ID NO:2058; and a light chain variable region comprising an amino acid sequence that has at least 90% sequence identity to SEQ ID NO:2069; or

[0443] (f) a heavy chain variable region comprising an amino acid sequence that has at least 90% sequence identity to SEQ ID NO:2059; and a light chain variable region comprising an amino acid sequence that has at least 90% sequence identity to SEQ ID NO:2070; or

[0444] (g) a heavy chain variable region comprising an amino acid sequence that has at least 90% sequence identity to SEQ ID NO:2060; and a light chain variable region comprising an amino acid sequence that has at least 90% sequence identity to SEQ ID NO:2071; or

[0445] (h) a heavy chain variable region comprising an amino acid sequence that has at least 90% sequence identity to SEQ ID NO:2061; and a light chain variable region comprising an amino acid sequence that has at least 90% sequence identity to SEQ ID NO:2072; or

[0446] (i) a heavy chain variable region comprising an amino acid sequence that has at least 90% sequence identity to SEQ ID NO:2062; and a light chain variable region comprising an amino acid sequence that has at least 90% sequence identity to SEQ ID NO:2073; or

[0447] (j) a heavy chain variable region comprising an amino acid sequence that has at least 90% sequence identity to SEQ ID NO:2063; and a light chain variable region comprising an amino acid sequence that has at least 90% sequence identity to SEQ ID NO:2074; or

[0448] (k) a heavy chain variable region comprising an amino acid sequence that has at least 90% sequence identity to SEQ ID NO:2064; and a light chain variable region comprising an amino acid sequence that has at least 90% sequence identity to SEQ ID NO:2075; or

[0449] (l) a heavy chain variable region comprising an amino acid sequence that has at least 90% sequence identity to SEQ ID NO:2065; and a light chain variable region comprising an amino acid sequence that has at least 90% sequence identity to SEQ ID NO:2076; or

[0450] (m) a heavy chain variable region comprising an amino acid sequence that has at least 90% sequence identity to SEQ ID NO:2346, and a light chain variable region comprising an amino acid sequence that has at least 90% sequence identity to SEQ ID NO:2350; or

[0451] (n) a heavy chain variable region comprising an amino acid sequence that has at least 90% sequence identity to SEQ ID NO:2354, and a light chain variable region comprising an amino acid sequence that has at least 90% sequence identity to SEQ ID NO:2358.

[0452] In some embodiments, the antibody is an antibody disclosed in Table 15 of PCT Patent Application Publication No. WO2019/055841A1, reproduced as TABLE G1 below. In some embodiments, the antibody is an antibody comprises a light chain variable domain comprising a CDRL1, CDRL2, and CDRL3, and a heavy chain variable domain comprising a CDRH1, CDRH2, and CDRH3 disclosed in TABLE Gl.

TABLE G1

| Description | Sequence |
|---|---|
| muIgG1 3′ primer | GGACAGGGATCCAGAGTTCC (SEQ ID NO: 2042) |
| muIgG2 3′ primer | AGCTGGGAAGGTGTGCACAC (SEQ ID NO: 2043) |
| muIgG3 3′ primer | CAGGGGCCAGTGGATAGAC (SEQ ID NO: 2044) |
| muCkappa.1 3′ | GACATTGATGTCTTTGGGGT (SEQ ID NO: 2045) |
| primer | |
| muCkappa.2 3′ | TTCACTGCCATCAATCTTCC (SEQ ID NO: 2046) |
| primer | |
| R59.F6 VH amino | QVQLQQPGAELVKPGASVKLSCKASGYTFTSYWMHWVKQSPGRGLE |
| acid sequence | WIGRSDPTTGGTNYNEKFKTKATLTVDKPSSTAYMQLSSLTSDDSAV |
| | YYCVRTSGTGDYWGQGTSLTVSSAKTTAPSVYPLAPVCGGTTGSSVT |
| | (SEQ ID NO: 2047) |
| R59.F6 VL amino | DVVMTQTPLSLPVSLGDQASISCRSSQSLVHNNGNTFLHWYLQKPGQ |
| acid sequence | SPKWYkVSNRFSGVPDRFSGSGSGTDFTLKISRVEAEDLGVYFCSQTT |
| | HVPPTFGGGTKLEIKRADAAPTVSIFPPSSEQLTSGGASVVCF |
| | (SEQ ID NO: 2048) |
| R59.F6 CDR-H1 | GYTFTSY (SEQ ID NO: 2049) |
| amino acid sequence | |
| R59.F6 CDR-H2 | IGRSDPTTGGTNYNE (SEQ ID NO: 2050) |
| amino acid sequence | |
| R59.F6 and RS.F10 | VRTSGTGDY (SEQ ID NO: 2051) |
| CDR-H3 amino acid | |
| sequence | |
| R59.F6 and RS.F10 | RSSQSLVHNNGNTFLH (SEQ ID NO: 2052) |
| CDR-L1 amino acid | |
| sequence | |
| R59.F6 CDR-L2 | VSNRFS (SEQ ID NO: 2053) |
| amino acid sequence | |
| R59.F6 and RS.F10 | SQTTHVPPT (SEQ ID NO: 2054) |
| CDR-L3 amino acid | |
| sequence | |
| 21D11 VH amino | QVQLQQSGAELARPGASVKLSCKASGYTFTSYWIQWVKQRPGQGLE |
| acid sequence | WIGTIYPGDGDARYTQKFKGKATLTADKSSSTTYMQLNSLASEDSAV |
| | YYCARNGITTAGYYAMDYWGQGTSVTVSS (SEQ ID NO: 2055) |
| 21D4.D1 VH amino | QVQLQQSGADLLRPGVSVKISCKGSGYTFTDHAMHWVKQSHAESLE |
| acid sequence | WIGVISTYSGDTGYNQKFKGKATMTVDKSSSTAYLELARLTSEDSAIY |
| | YCAREGHYDDAMDYWGQGTSVTVSS (SEQ ID NO: 2056) |
| 26D2 VH amino acid | EVQLQQSGPELVKPGASVKMSCKASGYTFTSYVMHWVKQKPGQGLE |
| sequence | WIGYINPYTDGTKYNEKFKGKATLTSDKSSSTAYMDLSSLTSEDSAVY |
| | YCARGEVRRYALDYWGQGTSVTVSS (SEQ ID NO: 2057) |
| 26E2.A3 VH amino | QVHLQQSGSELRSPGSSVKLSCKDFDSEVFPISYMSWIRQKPGHGFEW |
| acid sequence; | IGDILPSIGGRIYGVKFEDRATLDADTVSNTAYLELNSLTSEDSAIYYC |
| 24B4.A1 VH amino | ARKDYGSLAYWGQGTLVTVSA (SEQ ID NO: 2058) |
| acid sequence | |
| 3D3.A1 VH amino | EVQLQQSGPELVKPGASVKISCKTSGYTLSEYTMHWVIQSHGKSLEWI |
| acid sequence | GGVIPNSGGTSYNQKFRDKASLTVDKSSSTAYLELRSLTSEDSAVYYC |
| | ARGDDSYRRGYALDYWGQGTSVTVSS (SEQ ID NO: 2059) |
| 40H3.A4 VH amino | EVQLQQSGAEVVKPGASVKLSCTASGFNIKDTYMHWVKQRPEQGLE |
| acid sequence | WIGRIDPANGNTKYDPKFQGKATITADTSSNTAYLQLSSLTSEDTAVY |
| | YCATLFAYWGQGTLVTVSA (SEQ ID NO: 2060) |
| 42E8.H1 VH amino | DVQLQESGPGLVKPSQSLSLTCTVTGYSITSDYAWNWIRQFPGNKLE |
| acid sequence | WMGYINYSGRTIYNPSLKSRISITRDTSKNHFFLQLISVTTEDTATYYC |
| | ARWNGNYGFAYWGQGTLVTVSA (SEQ ID NO: 2061) |
| 49H1 LB1 VH amino | DVQLQESGPGLVKPSQSLSLTCTVTGYSITSDYAWNWIRQFPGNRLE |
| acid sequence | WMGYISFSGSTSYNPSLKSRISITRDTSKNQFFLQLNSVTTEDTATYYC |
| | ARWNGNYGFAYWGQGTLVTVSA (SEQ ID NO: 2062) |
| 54C2.A1 VH amino | QVHLQQSGSELRSPGSSVKLSCKDFDSEVFPIAYMSWVRQKPGHGFE |
| acid sequence | WIGDILPSIGRRIYGVKFEDKATLDADTVSNTAYLELNSLTSEDSAIYY |
| | CTRKDYGSLAYWGQGTLVTVSA (SEQ ID NO: 2063) |
| 57D7.A1 VH amino | QVQLKESGPGLVAPSQSLSITCTVSGFSLSRYSVYWVRQPPGKGLEWL |
| acid sequence | GMIWGGGNTDYNSALKSRLSISKDNSKSQVFLKMNSLQTDDSAMYY |
| | CVQYGGMDYWGQGTSVTVSS (SEQ ID NO: 2064) |
| RS9.F6 VH amino | QVQLQQPGAELVKPGASVKLSCKASGYTFTSYWMHWVKQSPGRGLE |
| acid sequence; | WIGRSDPTTGGTNYNEKFKTKATLTVDKPSSTAYMQLSSLTSDDSAV |
| RS.F10 VH amino | YYCVRTSGTGDYWGQGTSLTVSS (SEQ ID NO: 2065) |
| acid sequence | |
| 2ID11 VL amino | DIQMTQSPASLSVSVGETVTITCRASENIYSNLAWYQQKQGRSPQLLV |
| acid sequence | YAATNLADGVPSRFSGSGSGTQYSLKINSLQSEDFGYYYCQHFWGTP |
| | YTFGGGTKVEIK (SEQ ID NO: 2066) |
| 21D4.D1 VL amino | DVVMTQTPLTLSVTIGQPASFSCKSSQSLLDSDGKTYLNWLLRRPGQS |
| acid sequence | PKRLIYVVSKLDSGVPDRFTGSGSGTDFTLKISRVEAEDLGVYYCWQG |
| | THFPYTFGGGTKLEIK (SEQ ID NO: 2067) |
| 26D2 VL amino acid | DIQMTQSSSSFSVSLGDRVTITCKASEDIYNRLAWYQQKPGNAPRLLIS |
| sequence | GATSLETGVPSRFSGSGSGKDYTLSITSLQTEDVATYYCQQYWSTPWT |
| | FGGGTKLEIK (SEQ ID NO: 2068) |
| 26E2.A3 VL amino | DVVMTQTPLSLPVSLGDQASISCRSSQSLVHINGNTYLQWFLQKPGQS |
| acid sequence; | PKLLIYKVSNRFSGVPDRFSGSGSGTAFTLKISRVEAEDLGVYFCSQST |
| 24B4.A1 VL amino | HVPYTFGGGTKLEIK (SEQ ID NO: 2069) |
| acid sequence | |
| 3D3.A1 VL amino | DIVMSQSPSSLAVSVGEKVTMSCKSSQSLLYSSNQKSYLAWYQQKPG |
| acid sequence | QSPKLLIYWASTRESGVPDRFRGSGSGTDFTLTISSVKAEDLAVYYCQ |
| | QYFSYPPTFGGGTKLEIK (SEQ ID NO: 2070) |
| 40H3.A4 VL amino | DIVMTQAAFSNPVTLGTSASISCRSSKSLLHSNGITYLYWYLQKPGQSP |
| acid sequence | QLLIYQMSNLASGVPDRFSSSGSGIDFTLRINRVEAEDVGVYYCAQNL |
| | ELPTFGSGTKLEIK (SEQ ID NO: 2071) |
| 42E8.H1 VL amino | DVVMTQNPLSLPVSLGDQASISCRSSQSLVHINGNTYLHWYLQKPGQS |
| acid sequence | PKWYKVSNRFSGVPDRFSGSGSGTDFTLKISRVEAEDLGVYFCSQTT |
| | HALFTFGSGTKLEIK (SEQ ID NO: 2072) |
| 49H1 LB 1 VL amino | DVVMTQTPLSLPVSLGDQASISCRSSQSLVHINGNTYLHWYLQKPGQS |
| acid sequence | PKLLIYKVSNRFSGVPDRFSGSGSGTDFTLKISRVEAEDLGVYFCSQST |
| | HVTFTFGSGTKLEIK (SEQ ID NO: 2073) |
| 54C2.A1 VL amino | DVVMTQTPLSLPVSLGDQASISCRSSQSLVHINGNTYLQWYLQKPGQS |
| acid | PKLLIYKVSNRFSGVPDRFSGSGSGTDFTLRISRVEAEDLGVYFCSQST |
| | HLPYTFGGGTKLEIK (SEQ ID NO: 2074) |
| 57D7.A1 VL amino | DVLMTQTPLSLPVSLGDQASISCRSSQSIVHSNGNTYLEWYLQKPGQS |
| acid sequence | PKWYKVSNRFSGVPDRFSGSGSGTDFTLKISRVEAEDLGVYYCFQGS |
| | HVPYTFGGGTKLEIK (SEQ ID NO: 2075) |
| RS9.F6 VL amino | DVVMTQTPLSLPVSLGDQASISCRSSQSLVHNNGNTFLHWYLQKPGQ |
| acid sequence; | SPKWYKVSNRFSGVPDRFSGSGSGTDFTLKISRVEAEDLGVYFCSQT |
| RS.F10 VL amino | THVPPTFGGGTKLEIK (SEQ ID NO: 2076) |
| acid sequence | |
| RS9.F6 and RS.F10 | GYTFTSYWMH (SEQ ID NO: 2077) |
| CDR-H1 | |
| R59.F6 and RS.F10 | RSDPTTGGTNYNEKFKT (SEQ ID NO: 2078) |
| CDR-H2 | |
| RS9.F6. RS.F10, | KVSNRFS (SEQ ID NO: 2079) |
| 26E2.A3, 24B4.A1, | |
| 42E8.H1, 49H11.B1, | |
| 54C2.A1, and | |
| 57D7.A1 CDR-L2 | |
| 2ID11 CDR-H1 | GYTFTSYWIQ (SEQ ID NO: 2080) |
| 2ID11 CDR-H2 | TIYPGDGDARYTQKFKG (SEQ ID NO: 2081) |
| 2ID11 CDR-H3 | ARNGITTAGYYAMDY (SEQ ID NO: 2082) |
| 2ID11 CDR-L1 | RASENIYSNLA (SEQ ID NO: 2083) |
| 2ID11 CDR-L2 | AATNLAD (SEQ ID NO: 2084) |
| 2ID11 CDR-L3 | QHFWGTPYT (SEQ ID NO: 2085) |
| 21D4.D1 CDR-H1 | GYTFTDHAMH (SEQ ID NO: 2086) |
| 21D4.D1 CDR-H2 | VISTYSGDTGYNQKFKG (SEQ ID NO: 2087) |
| 21D4.D1 CDR-H3 | AREGHYDDAMDY (SEQ ID NO: 2088) |
| 21D4.D1 and 51D4 | KSSQSLLDSDGKTYLN (SEQ ID NO: 2089) |
| CDR-L1 | |
| 21D4.D1 CDR-L2 | VVSKLDS (SEQ ID NO: 2090) |
| 21D4.D1 and 51D4 | WQGTFIFPYT (SEQ ID NO: 2091) |
| CDR-L3 | |
| 26D2 CDR-H1 | GYTFTSYVMH (SEQ ID NO: 2092) |
| 26D2 CDR-H2 | YINPYTDGTKYNEKFKG (SEQ ID NO: 2093) |
| 26D2 CDR-H3 | ARGEVRRYALDY (SEQ ID NO: 2094) |
| 26D2 CDR-L1 | KASEDIYNRLA (SEQ ID NO: 2095) |
| 26D2 CDR-L2 | GATSLET (SEQ ID NO: 2096) |
| 26D2 CDR-L3 | QQYWSTPWT (SEQ ID NO: 2097) |
| 26E2.A3 and | DSEVFPISYMS (SEQ ID NO: 2098) |
| 24B4.A1 CDR-H1 | |
| 26E2.A3 and | DILPSIGGRIYGVKF (SEQ ID NO: 2099) |
| 24B4.A1 CDR-H2 | |
| 26E2.A3 and | ARKDYGSLAY (SEQ ID NO: 2100) |
| 24B4.A1 CDR-H3 | |
| 26E2.A3, 24B4.A1, | RSSQSLVHINGNTYLQ (SEQ ID NO: 2101) |
| and 54C2.A1 CDR-Ll | |
| 26E2.A3 and | SQSTHVPYT (SEQ ID NO: 2102) |
| 24B4.A1 CDR-L3 | |
| 3D3.A1 CDR-H1 | GYTLSEYTMH (SEQ ID NO: 2103) |
| 3D3.A1 CDR-H2 | GVIPNSGGTSYNQKFRD (SEQ ID NO: 2104) |
| 3D3.A1 CDR-H3 | ARGDDSYRRGYALDY (SEQ ID NO: 2105) |
| 3D3.A1 CDR-L1 | KSSQSLLYSSNQKSYLA (SEQ ID NO: 2106) |
| 3D3.A1 CDR-L2 | WASTRES (SEQ ID NO: 2107) |
| 3D3.A1 CDR-L3 | QQYFSYPPT (SEQ ID NO: 2108) |
| 40H3.A4 CDR-H1 | GFNIKDTYMH (SEQ ID NO: 2109) |
| 40H3.A4 CDR-H2 | RIDPANGNTKYDPKFQG (SEQ ID NO: 2110) |
| 40H3.A4 CDR-H3 | ATLFAY (SEQ ID NO: 2111) |
| 40H3.A4 CDR-L1 | RSSKSLLHSNGITYLY (SEQ ID NO: 2112) |
| 40H3.A4 CDR-L2 | QMSNLAS (SEQ ID NO: 2113) |
| 40H3.A4 CDR-L3 | AQNLELPT (SEQ ID NO: 2114) |
| 42E8.H1 and 49H11.B1 | GYSITSDYAWN (SEQ ID NO: 2115) |
| CDR-H1 | |
| 42E8.H1 CDR-H2 | YINYSGRTIYNPSLKS (SEQ ID NO: 2116) |
| 42E8.H1 and 49H11.B1 | ARWNGNYGFAY (SEQ ID NO: 2117) |
| CDR-H3 | |
| 42E8.H1 and 49H11.B1 | RSSQSLVHINGNTYLH (SEQ ID NO: 2118) |
| CDR-L1 | |
| 42E8.H1 CDR-L3 | SQTTHALFT (SEQ ID NO: 2119) |
| 49H11.B1 CDR-H2 | YISFSGSTSYNPSLKS (SEQ ID NO: 2120) |
| 49H11.B1 CDR-L3 | SQSTHVTFT (SEQ ID NO: 2121) |
| 54C2.A1 CDR-H1 | DSEVFPIAYMS (SEQ ID NO: 2122) |
| 54C2.A1 CDR-H2 | DILPSIGRRIYGVKFED (SEQ ID NO: 2123) |
| 54C2.A1 CDR-H3 | KDYGSLAY (SEQ ID NO: 2124) |
| 54C2.A1 CDR-L3 | SQSTHLPYT (SEQ ID NO: 2125) |
| 57D7.A1 CDR-H1 | GFSLSRYSVY (SEQ ID NO: 2126) |
| 57D7.A1 CDR-H2 | MIWGGGNTDYNSALKS (SEQ ID NO: 2127) |
| 57D7.A1 CDR-H3 | YGGMDY (SEQ ID NO: 2128) |
| 57D7.A1 CDR-L1 | RSSQSIVHSNGNTYLE (SEQ ID NO: 2129) |
| 57D7.A1 CDR-L3 | FQGSHVPYT (SEQ ID NO: 2130) |
| RS9.F6-Fd | QVQLQQPGAELVKPGASVKLSCKASGYTFTSYWMHWVKQSPGRGLE |
| | WIGRSDPTTGGTNYNEKFKTKATLTVDKPSSTAYMQLSSLTSDDSAV |
| | YYCVRTSGTGDYWGQGTSLTVSSASTKGPSVFPLAPSSKSTSGGTAAL |
| | GCLVKDYFPEPVTVSWNSGALTSGVHTFPAVLQSSGLYSLSSVVTVPS |
| | SSLGTQTYICNVNHKPSNTKVDKKVEPKSCDKTH (SEQ ID NO: 2131) |
| RS9.F6-Fd fused to | QVQLQQPGAELVKPGASVKLSCKASGYTFTSYWMHWVKQSPGRGLE |
| Fc with LALAPG, | WIGRSDPTTGGTNYNEKFKTKATLTVDKPSSTAYMQLSSLTSDDSAV |
| TfR binding, and | YYCVRTSGTGDYWGQGTSLTVSSASTKGPSVFPLAPSSKSTSGGTAAL |
| knob mutations | GCLVKDYFPEPVTVSWNSGALTSGVHTFPAVLQSSGLYSLSSVVTVPS |
| | SSLGTQTYICNVNHKPSNTKVDKKVEPKSCDKTHTCPPCPAPEAAGGP |
| | SVFLFPPKPKDTLMISRTPEVTCVVVDVSHEDPEVKFNWYVDGVEVH |
| | NAKTKPREEQYNSTYRVVSVLTVLHQDWLNGKEYKCKVSNKALGAP |
| | IEKTISKAKGQPREPQVYTLPPSRDELTKNQVSLWCLVKGFYPSDIAVL |
| | WESYGTEWASYKTTPPVLDSDGSFFLYSKLTVTKEEWQQGFVFSCSV |
| | MHEALHNHYTQKSLSLSPGK (SEQ ID NO: 2132) |
| RS9.F6-Fd fused to | QVQLQQPGAELVKPGASVKLSCKASGYTFTSYWMHWVKQSPGRGLE |
| Fc with LALAPG and | WIGRSDPTTGGTNYNEKFKTKATLTVDKPSSTAYMQLSSLTSDDSAV |
| hole mutations | YYCVRTSGTGDYWGQGTSLTVSSASTKGPSVFPLAPSSKSTSGGTAAL |
| | GCLVKDYFPEPVTVSWNSGALTSGVHTFPAVLQSSGLYSLSSVVTVPS |
| | SSLGTQTYICNVNHKPSNTKVDKKVEPKSCDKTHTCPPCPAPEAAGGP |
| | SVFLFPPKPKDTLMISRTPEVTCVVVDVSHEDPEVKFNWYVDGVEVH |
| | NAKTKPREEQYNSTYRVVSVLTVLHQDWLNGKEYKCKVSNKALGAP |
| | IEKTISKAKGQPREPQVYTLPPSRDELTKNQVSLSCAVKGFYPSDIAVE |
| | WESNGQPENNYKTTPPVLDSDGSFFLVSKLTVDKSRWQQGNVFSCSV |
| | MHEALHNHYTQKSLSLSPGK (SEQ ID NO: 2133) |
| 3D3.A1-Fd | EVQLQQSGPELVKPGASVKISCKTSGYTLSEYTMHWVIQSHGKSLEWI |
| | GGVIPNSGGTSYNQKFRDKASLTVDKSSSTAYLELRSLTSEDSAVYYC |
| | ARGDDSYRRGYALDYWGQGTSVTVSSASTKGPSVFPLAPSSKSTSGG |
| | TAALGCLVKDYFPEPVTVSWNSGALTSGVHTFPAVLQSSGLYSLSSVV |
| | TVPSSSLGTQTYICNVNHKPSNTKVDKKVEPKSCDKTH |
| | (SEQ ID NO: 2134) |
| 3D3.A1-Fd fused to | EVQLQQSGPELVKPGASVKISCKTSGYTLSEYTMHWVIQSHGKSLEWI |
| Fc with LALAPG, | GGVIPNSGGTSYNQKFRDKASLTVDKSSSTAYLELRSLTSEDSAVYYC |
| TfR binding, and | ARGDDSYRRGYALDYWGQGTSVTVSSASTKGPSVFPLAPSSKSTSGG |
| knob mutations | TAALGCLVKDYFPEPVTVSWNSGALTSGVHTFPAVLQSSGLYSLSSVV |
| | TVPSSSLGTQTYICNVNHKPSNTKVDKKVEPKSCDKTHTCPPCPAPEA |
| | AGGPSVFLFPPKPKDTLMISRTPEVTCVVVDVSHEDPEVKFNWYVDG |
| | VEVHNAKTKPREEQYNSTYRVVSVLTVLHQDWLNGKEYKCKVSNK |
| | ALGAPIEKTISKAKGQPREPQVYTLPPSRDELTKNQVSLWCLVKGFYP |
| | SDIAVLWESYGTEWASYKTTPPVLDSDGSFFLYSKLTVTKEEWQQGF |
| | VFSCSVMHEALHNHYTQKSLSLSPGK (SEQ ID NO: 2135) |
| 3D3.A1-Fd fused to | EVQLQQSGPELVKPGASVKISCKTSGYTLSEYTMHWVIQSHGKSLEWI |
| Fc with LALAPG and | GGVIPNSGGTSYNQKFRDKASLTVDKSSSTAYLELRSLTSEDSAVYYC |
| hole mutations | ARGDDSYRRGYALDYWGQGTSVTVSSASTKGPSVFPLAPSSKSTSGG |
| | TAALGCLVKDYFPEPVTVSWNSGALTSGVHTFPAVLQSSGLYSLSSVV |
| | TVPSSSLGTQTYICNVNHKPSNTKVDKKVEPKSCDKTHTCPPCPAPEA |
| | AGGPSVFLFPPKPKDTLMISRTPEVTCVVVDVSHEDPEVKFNWYVDG |
| | VEVHNAKTKPREEQYNSTYRVVSVLTVLHQDWLNGKEYKCKVSNK |
| | ALGAPIEKTISKAKGQPREPQVYTLPPSRDELTKNQVSLSCAVKGFYPS |
| | DIAVEWESNGQPENNYKTTPPVLDSDGSFFLVSKLTVDKSRWQQGNV |
| | FSCSVMHEALHNHYTQKSLSLSPGK (SEQ ID NO: 2136) |
| Human TREM2 | MEPLRLLILLFVTELSGAHNTTVFQGVAGQSLQVSCPYDSMKH |
| protein | WGRRKAWCRQLGEKGPCQRVVSTHNLWLLSFLRRWNGSTAIT |
| | DDTLGGTLTITLRNLQPHDAGLYQCQSLHGSEADTLRKVLVEVL |
| | ADPLDHRDAGDLWFPGESESFEDAHVEHSISRSLLEGEIPFPPTSI |
| | LLLLACIFLIKILAASALWAAAWHGQKPGTHPPSELDCGHDPGY |
| | QLQTLPGLRDT (SEQ ID NO: 1) |
| Human transferrin | MMDQARSAFSNLFGGEPLSYTRFSLARQVDGDNSHVEMKLAVDEEE |
| receptor protein 1 | NADNNTKANVTKPKRCSGSICYGTIAVIVFFLIGFMIGYLGYCKGVEP |
| (TFR1) | KTECERLAGTESPVREEPGEDFPAARRLYWDDLKRKLSEKLDSTDFTG |
| | TIKLLNENSYVPREAGSQKDENLALYVENQFREFKLSKVWRDQHFVK |
| | IQVKDSAQNSVIIVDKNGRLVYLVENPGGYVAYSKAATVTGKLVHAN |
| | FGTKKDFEDLYTPVNGSIVIVRAGKITFAEKVANAESLNAIGVLIYMD |
| | QTKFPIVNAELSFFGHAHLGTGDPYTPGFPSFNHTQFPPSRSSGLPNIPV |
| | QTISRAAAEKLFGNMEGDCPSDWKTDSTCRMVTSESKNVKLTVSNVL |
| | KEIKILNIFGVIKGFVEPDHYVVVGAQRDAWGPGAAKSGVGTALLLK |
| | LAQMFSDMVLKDGFQPSRSIIFASWSAGDFGSVGATEWLEGYLSSLHL |
| | KAFTYINLDKAVLGTSNFKVSASPLLYTLIEKTMQNVKHPVTGQFLYQ |
| | DSNWASKVEKLTLDNAAFPFLAYSGIPAVSFCFCEDTDYPYLGTTMD |
| | TYKELIERIPELNKVARAAAEVAGQFVIKLTHDVELNLDYERYNSQLL |
| | SFVRDLNQYRADIKEMGLSLQWLYSARGDFFRATSRLTTDFGNAEKT |
| | DRFVMKKLNDRVMRVEYHFLSPYVSPKESPFRHVFWGSGSHTLPALL |
| | ENLKLRKQNNGAFNETLFRNQLALATWTIQGAANALSGDVWDIDNE |
| | F (SEQ ID NO: 2137) |
| Wild-type human Fc | APELLGGPSVFLFPPKPKDTLMISRTPEVTCVVVDVSHEDPEVKFNWY |
| sequence posifions | VDGVEVHNAKTKPREEQYNSTYRVVSVLTVLHQDWLNGKEYKCKV |
| 231-447 EU index | SNKALPAPIEKTISKAKGQPREPQVYTLPPSRDELTKNQVSLTCLVKGF |
| numbering | YPSDIAVEWESNGQPENNYKTTPPVLDSDGSFFLYSKLTVDKSRWQQ |
| | GNVFSCSVMHEALHNHYTQKSLSLSPGK (SEQ ID NO: 2138) |
| Human IgG1 hinge | EPKSCDKTHTCPPCP (SEQ ID NO: 2139) |
| sequence | |
| Clone CH3C.35.20 | APELLGGPSVFLFPPKPKDTLMISRTPEVTCVVVDVSHEDPEVKFNWY |
| | VDGVEVHNAKTKPREEQYNSTYRVVSVLTVLHQDWLNGKEYKCKV |
| | SNKALPAPIEKTISKAKGQPREPQVYTLPPSRDELTKNQVSLTCLVKGF |
| | YPSDIAVEWESYGTEWSSYKTTPPVLDSDGSFFLYSKLTVTKEEWQQ |
| | GFVFSCSVMHEALHNHYTQKSLSLSPGK (SEQ ID NO: 2140) |
| Clone CH3C.35.21 | APELLGGPSVFLFPPKPKDTLMISRTPEVTCVVVDVSHEDPEVKFNWY |
| | VDGVEVHNAKTKPREEQYNSTYRVVSVLTVLHQDWLNGKEYKCKV |
| | SNKALPAPIEKTISKAKGQPREPQVYTLPPSRDELTKNQVSLTCLVKGF |
| | YPSDIAVWWESYGTEWSSYKTTPPVLDSDGSFFLYSKLTVTKEEWQQ |
| | GFVFSCSVMHEALHNHYTQKSLSLSPGK (SEQ ID NO: 2141) |
| Clone CH3C.35.22 | APELLGGPSVFLFPPKPKDTLMISRTPEVTCVVVDVSHEDPEVKFNWY |
| | VDGVEVHNAKTKPREEQYNSTYRVVSVLTVLHQDWLNGKEYKCKV |
| | SNKALPAPIEKTISKAKGQPREPQVYTLPPSRDELTKNQVSLTCLVKGF |
| | YPSDIAVWWESYGTEWSNYKTTPPVLDSDGSFFLYSKLTVTKSEWQQ |
| | GFVFSCSVMHEALHNHYTQKSLSLSPGK (SEQ ID NO: 2142) |
| Clone CH3C.35.23 | APELLGGPSVFLFPPKPKDTLMISRTPEVTCVVVDVSHEDPEVKFNWY |
| | VDGVEVHNAKTKPREEQYNSTYRVVSVLTVLHQDWLNGKEYKCKV |
| | SNKALPAPIEKTISKAKGQPREPQVYTLPPSRDELTKNQVSLTCLVKGF |
| | YPSDIAVEWESYGTEWSNYKTTPPVLDSDGSFFLYSKLTVTKEEWQQ |
| | GFVFSCSVMHEALHNHYTQKSLSLSPGK (SEQ ID NO: 2143) |
| Clone CH3C.35.24 | APELLGGPSVFLFPPKPKDTLMISRTPEVTCVVVDVSHEDPEVKFNWY |
| | VDGVEVHNAKTKPREEQYNSTYRVVSVLTVLHQDWLNGKEYKCKV |
| | SNKALPAPIEKTISKAKGQPREPQVYTLPPSRDELTKNQVSLTCLVKGF |
| | YPSDIAVWWESYGTEWSNYKTTPPVLDSDGSFFLYSKLTVTKEEWQQ |
| | GFVFSCSVMHEALHNHYTQKSLSLSPGK (SEQ ID NO: 2144) |
| Clone CH3C.35.21.17 | APELLGGPSVFLFPPKPKDTLMISRTPEVTCVVVDVSHEDPEVKFNWY |
| | VDGVEVHNAKTKPREEQYNSTYRVVSVLTVLHQDWLNGKEYKCKV |
| | SNKALPAPIEKTISKAKGQPREPQVYTLPPSRDELTKNQVSLTCLVKGF |
| | YPSDIAVLWESYGTEWSSYKTTPPVLDSDGSFFLYSKLTVTKEEWQQ |
| | GFVFSCSVMHEALHNHYTQKSLSLSPGK (SEQ ID NO: 2145) |
| Clone CH3C.35.20.1 | APELLGGPSVFLFPPKPKDTLMISRTPEVTCVVVDVSHEDPEVKFNWY |
| | VDGVEVHNAKTKPREEQYNSTYRVVSVLTVLHQDWLNGKEYKCKV |
| | SNKALPAPIEKTISKAKGQPREPQVYTLPPSRDELTKNQVSLTCLVKGF |
| | YPSDIAVEWESFGTEWSSYKTTPPVLDSDGSFFLYSKLTVTKEEWQQG |
| | FVFSCSVMHEALHNHYTQKSLSLSPGK (SEQ ID NO: 2146) |
| Clone CH3C.35.20.2 | APELLGGPSVFLFPPKPKDTLMISRTPEVTCVVVDVSHEDPEVKFNWY |
| | VDGVEVHNAKTKPREEQYNSTYRVVSVLTVLHQDWLNGKEYKCKV |
| | SNKALPAPIEKTISKAKGQPREPQVYTLPPSRDELTKNQVSLTCLVKGF |
| | YPSDIAVEWESYGTEWASYKTTPPVLDSDGSFFLYSKLTVTKEEWQQ |
| | GFVFSCSVMHEALHNHYTQKSLSLSPGK (SEQ ID NO: 2147) |
| Clone CH3C.35.20.3 | APELLGGPSVFLFPPKPKDTLMISRTPEVTCVVVDVSHEDPEVKFNWY |
| | VDGVEVHNAKTKPREEQYNSTYRVVSVLTVLHQDWLNGKEYKCKV |
| | SNKALPAPIEKTISKAKGQPREPQVYTLPPSRDELTKNQVSLTCLVKGF |
| | YPSDIAVEWESYGTEWVSYKTTPPVLDSDGSFFLYSKLTVTKEEWQQ |
| | GFVFSCSVMHEALHNHYTQKSLSLSPGK (SEQ ID NO: 2148) |
| Clone CH3C.35.20.4 | APELLGGPSVFLFPPKPKDTLMISRTPEVTCVVVDVSHEDPEVKFNWY |
| | VDGVEVHNAKTKPREEQYNSTYRVVSVLTVLHQDWLNGKEYKCKV |
| | SNKALPAPIEKTISKAKGQPREPQVYTLPPSRDELTKNQVSLTCLVKGF |
| | YPSDIAVEWESYGTEWSSYKTTPPVLDSDGSFFLYSKLTVSKEEWQQG |
| | FVFSCSVMHEALHNHYTQKSLSLSPGK (SEQ ID NO: 2149) |
| Clone CH3C.35.20.5 | APELLGGPSVFLFPPKPKDTLMISRTPEVTCVVVDVSHEDPEVKFNWY |
| | VDGVEVHNAKTKPREEQYNSTYRVVSVLTVLHQDWLNGKEYKCKV |
| | SNKALPAPIEKTISKAKGQPREPQVYTLPPSRDELTKNQVSLTCLVKGF |
| | YPSDIAVEWESFGTEWASYKTTPPVLDSDGSFFLYSKLTVTKEEWQQ |
| | GFVFSCSVMHEALHNHYTQKSLSLSPGK (SEQ ID NO: 2150) |
| Clone CH3C.35.20.6 | APELLGGPSVFLFPPKPKDTLMISRTPEVTCVVVDVSHEDPEVKFNWY |
| | VDGVEVHNAKTKPREEQYNSTYRVVSVLTVLHQDWLNGKEYKCKV |
| | SNKALPAPIEKTISKAKGQPREPQVYTLPPSRDELTKNQVSLTCLVKGF |
| | YPSDIAVEWESFGTEWVSYKTTPPVLDSDGSFFLYSKLTVTKEEWQQ |
| | GFVFSCSVMHEALHNHYTQKSLSLSPGK (SEQ ID NO: 2151) |
| Clone CH3C.35.21.a.1 | APELLGGPSVFLFPPKPKDTLMISRTPEVTCVVVDVSHEDPEVKFNWY |
| | VDGVEVHNAKTKPREEQYNSTYRVVSVLTVLHQDWLNGKEYKCKV |
| | SNKALPAPIEKTISKAKGQPREPQVYTLPPSRDELTKNQVSLTCLVKGF |
| | YPSDIAVWWESFGTEWSSYKTTPPVLDSDGSFFLYSKLTVTKEEWQQ |
| | GFVFSCSVMHEALHNHYTQKSLSLSPGK (SEQ ID NO: 2152) |
| Clone | APELLGGPSVFLFPPKPKDTLMISRTPEVTCVVVDVSHEDPEVKFNWY |
| CH3C.35.21.a.2 | VDGVEVHNAKTKPREEQYNSTYRVVSVLTVLHQDWLNGKEYKCKV |
| | SNKALPAPIEKTISKAKGQPREPQVYTLPPSRDELTKNQVSLTCLVKGF |
| | YPSDIAVWWESYGTEWASYKTTPPVLDSDGSFFLYSKLTVTKEEWQQ |
| | GFVFSCSVMHEALHNHYTQKSLSLSPGK (SEQ ID NO: 2153) |
| Clone | APELLGGPSVFLFPPKPKDTLMISRTPEVTCVVVDVSHEDPEVKFNWY |
| CH3C.35.21.a.3 | VDGVEVHNAKTKPREEQYNSTYRVVSVLTVLHQDWLNGKEYKCKV |
| | SNKALPAPIEKTISKAKGQPREPQVYTLPPSRDELTKNQVSLTCLVKGF |
| | YPSDIAVWWESYGTEWVSYKTTPPVLDSDGSFFLYSKLTVTKEEWQQ |
| | GFVFSCSVMHEALHNHYTQKSLSLSPGK (SEQ ID NO: 2154) |
| Clone | APELLGGPSVFLFPPKPKDTLMISRTPEVTCVVVDVSHEDPEVKFNWY |
| CH3C.35.21.a.4 | VDGVEVHNAKTKPREEQYNSTYRVVSVLTVLHQDWLNGKEYKCKV |
| | SNKALPAPIEKTISKAKGQPREPQVYTLPPSRDELTKNQVSLTCLVKGF |
| | YPSDIAVWWESYGTEWSSYKTTPPVLDSDGSFFLYSKLTVSKEEWQQ |
| | GFVFSCSVMHEALHNHYTQKSLSLSPGK (SEQ ID NO: 2155) |
| Clone | APELLGGPSVFLFPPKPKDTLMISRTPEVTCVVVDVSHEDPEVKFNWY |
| CH3C.35.21.a.5 | VDGVEVHNAKTKPREEQYNSTYRVVSVLTVLHQDWLNGKEYKCKV |
| | SNKALPAPIEKTISKAKGQPREPQVYTLPPSRDELTKNQVSLTCLVKGF |
| | YPSDIAVWWESFGTEWASYKTTPPVLDSDGSFFLYSKLTVTKEEWQQ |
| | GFVFSCSVMHEALHNHYTQKSLSLSPGK (SEQ ID NO: 2156) |
| Clone | APELLGGPSVFLFPPKPKDTLMISRTPEVTCVVVDVSHEDPEVKFNWY |
| CH3C.35.21.a.6 | VDGVEVHNAKTKPREEQYNSTYRVVSVLTVLHQDWLNGKEYKCKV |
| | SNKALPAPIEKTISKAKGQPREPQVYTLPPSRDELTKNQVSLTCLVKGF |
| | YPSDIAVWWESFGTEWVSYKTTPPVLDSDGSFFLYSKLTVTKEEWQQ |
| | GFVFSCSVMHEALHNHYTQKSLSLSPGK (SEQ ID NO: 2157) |
| Clone CH3C.35.23.1 | APELLGGPSVFLFPPKPKDTLMISRTPEVTCVVVDVSHEDPEVKFNWY |
| | VDGVEVHNAKTKPREEQYNSTYRVVSVLTVLHQDWLNGKEYKCKV |
| | SNKALPAPIEKTISKAKGQPREPQVYTLPPSRDELTKNQVSLTCLVKGF |
| | YPSDIAVEWESFGTEWSNYKTTPPVLDSDGSFFLYSKLTVTKEEWQQ |
| | GFVFSCSVMHEALHNHYTQKSLSLSPGK (SEQ ID NO: 2158) |
| Clone CH3C.35.23.2 | APELLGGPSVFLFPPKPKDTLMISRTPEVTCVVVDVSHEDPEVKFNWY |
| | VDGVEVHNAKTKPREEQYNSTYRVVSVLTVLHQDWLNGKEYKCKV |
| | SNKALPAPIEKTISKAKGQPREPQVYTLPPSRDELTKNQVSLTCLVKGF |
| | YPSDIAVEWESYGTEWANYKTTPPVLDSDGSFFLYSKLTVTKEEWQQ |
| | GFVFSCSVMHEALHNHYTQKSLSLSPGK (SEQ ID NO: 2159) |
| Clone CH3C.35.23.3 | APELLGGPSVFLFPPKPKDTLMISRTPEVTCVVVDVSHEDPEVKFNWY |
| | VDGVEVHNAKTKPREEQYNSTYRVVSVLTVLHQDWLNGKEYKCKV |
| | SNKALPAPIEKTISKAKGQPREPQVYTLPPSRDELTKNQVSLTCLVKGF |
| | YPSDIAVEWESYGTEWVNYKTTPPVLDSDGSFFLYSKLTVTKEEWQQ |
| | GFVFSCSVMHEALHNHYTQKSLSLSPGK (SEQ ID NO: 2160) |
| Clone CH3C.35.23.4 | APELLGGPSVFLFPPKPKDTLMISRTPEVTCVVVDVSHEDPEVKFNWY |
| | VDGVEVHNAKTKPREEQYNSTYRVVSVLTVLHQDWLNGKEYKCKV |
| | SNKALPAPIEKTISKAKGQPREPQVYTLPPSRDELTKNQVSLTCLVKGF |
| | YPSDIAVEWESYGTEWSNYKTTPPVLDSDGSFFLYSKLTVSKEEWQQ |
| | GFVFSCSVMHEALHNHYTQKSLSLSPGK (SEQ ID NO: 2161) |
| Clone CH3C.35.23.5 | APELLGGPSVFLFPPKPKDTLMISRTPEVTCVVVDVSHEDPEVKFNWY |
| | VDGVEVHNAKTKPREEQYNSTYRVVSVLTVLHQDWLNGKEYKCKV |
| | SNKALPAPIEKTISKAKGQPREPQVYTLPPSRDELTKNQVSLTCLVKGF |
| | YPSDIAVEWESFGTEWANYKTTPPVLDSDGSFFLYSKLTVTKEEWQQ |
| | GFVFSCSVMHEALHNHYTQKSLSLSPGK (SEQ ID NO: 2162) |
| Clone CH3C.35.23.6 | APELLGGPSVFLFPPKPKDTLMISRTPEVTCVVVDVSHEDPEVKFNWY |
| | VDGVEVHNAKTKPREEQYNSTYRVVSVLTVLHQDWLNGKEYKCKV |
| | SNKALPAPIEKTISKAKGQPREPQVYTLPPSRDELTKNQVSLTCLVKGF |
| | YPSDIAVEWESFGTEWVNYKTTPPVLDSDGSFFLYSKLTVTKEEWQQ |
| | GFVFSCSVMHEALHNHYTQKSLSLSPGK (SEQ ID NO: 2163) |
| Clone CH3C.35.24.1 | APELLGGPSVFLFPPKPKDTLMISRTPEVTCVVVDVSHEDPEVKFNWY |
| | VDGVEVHNAKTKPREEQYNSTYRVVSVLTVLHQDWLNGKEYKCKV |
| | SNKALPAPIEKTISKAKGQPREPQVYTLPPSRDELTKNQVSLTCLVKGF |
| | YPSDIAVWWESFGTEWSNYKTTPPVLDSDGSFFLYSKLTVTKEEWQQ |
| | GFVFSCSVMHEALHNHYTQKSLSLSPGK (SEQ ID NO: 2164) |
| Clone CH3C.35.24.2 | APELLGGPSVFLFPPKPKDTLMISRTPEVTCVVVDVSHEDPEVKFNWY |
| | VDGVEVHNAKTKPREEQYNSTYRVVSVLTVLHQDWLNGKEYKCKV |
| | SNKALPAPIEKTISKAKGQPREPQVYTLPPSRDELTKNQVSLTCLVKGF |
| | YPSDIAVWWESYGTEWANYKTTPPVLDSDGSFFLYSKLTVTKEEWQQ |
| | GFVFSCSVMHEALHNHYTQKSLSLSPGK (SEQ ID NO: 2165) |
| Clone CH3C.35.24.3 | APELLGGPSVFLFPPKPKDTLMISRTPEVTCVVVDVSHEDPEVKFNWY |
| | VDGVEVHNAKTKPREEQYNSTYRVVSVLTVLHQDWLNGKEYKCKV |
| | SNKALPAPIEKTISKAKGQPREPQVYTLPPSRDELTKNQVSLTCLVKGF |
| | YPSDIAVWWESYGTEWVNYKTTPPVLDSDGSFFLYSKLTVTKEEWQQ |
| | GFVFSCSVMHEALHNHYTQKSLSLSPGK (SEQ ID NO: 2166) |
| Clone CH3C.35.24.4 | APELLGGPSVFLFPPKPKDTLMISRTPEVTCVVVDVSHEDPEVKFNWY |
| | VDGVEVHNAKTKPREEQYNSTYRVVSVLTVLHQDWLNGKEYKCKV |
| | SNKALPAPIEKTISKAKGQPREPQVYTLPPSRDELTKNQVSLTCLVKGF |
| | YPSDIAVWWESYGTEWSNYKTTPPVLDSDGSFFLYSKLTVSKEEWQQ |
| | GFVFSCSVMHEALHNHYTQKSLSLSPGK (SEQ ID NO: 2167) |
| Clone CH3C.35.24.5 | APELLGGPSVFLFPPKPKDTLMISRTPEVTCVVVDVSHEDPEVKFNWY |
| | VDGVEVHNAKTKPREEQYNSTYRVVSVLTVLHQDWLNGKEYKCKV |
| | SNKALPAPIEKTISKAKGQPREPQVYTLPPSRDELTKNQVSLTCLVKGF |
| | YPSDIAVWWESFGTEWANYKTTPPVLDSDGSFFLYSKLTVTKEEWQQ |
| | GFVFSCSVMHEALHNHYTQKSLSLSPGK (SEQ ID NO: 2168) |
| Clone CH3C.35.24.6 | APELLGGPSVFLFPPKPKDTLMISRTPEVTCVVVDVSHEDPEVKFNWY |
| | VDGVEVHNAKTKPREEQYNSTYRVVSVLTVLHQDWLNGKEYKCKV |
| | SNKALPAPIEKTISKAKGQPREPQVYTLPPSRDELTKNQVSLTCLVKGF |
| | YPSDIAVWWESFGTEWVNYKTTPPVLDSDGSFFLSKLTVTKEEWQQ |
| | GFVFSCSVMHEALHNHYTQKSLSLSPGK (SEQ ID NO: 2169) |
| Clone CH3C.35.21.17.1 | APELLGGPSVFLFPPKPKDTLMISRTPEVTCVVVDVSHEDPEVKFNWY |
| | VDGVEVHNAKTKPREEQYNSTYRVVSVLTVLHQDWLNGKEYKCKV |
| | SNKALPAPIEKTISKAKGQPREPQVYTLPPSRDELTKNQVSLTCLVKGF |
| | YPSDIAVLWESFGTEWSSYKTTPPVLDSDGSFFLYSKLTVTKEEWQQG |
| | FVFSCSVMHEALHNHYTQKSLSLSPGK (SEQ ID NO: 2170) |
| Clone CH3C.35.21.17.2 | APELLGGPSVFLFPPKPKDTLMISRTPEVTCVVVDVSHEDPEVKFNWY |
| | VDGVEVHNAKTKPREEQYNSTYRVVSVLTVLHQDWLNGKEYKCKV |
| | SNKALPAPIEKTISKAKGQPREPQVYTLPPSRDELTKNQVSLTCLVKGF |
| | YPSDIAVLWESYGTEWASYKTTPPVLDSDGSFFLYSKLTVTKEEWQQ |
| | GFVFSCSVMHEALHNHYTQKSLSLSPGK (SEQ ID NO: 2171) |
| Clone CH3C.35.21.17.3 | APELLGGPSVFLFPPKPKDTLMISRTPEVTCVVVDVSHEDPEVKFNWY |
| | VDGVEVHNAKTKPREEQYNSTYRVVSVLTVLHQDWLNGKEYKCKV |
| | SNKALPAPIEKTISKAKGQPREPQVYTLPPSRDELTKNQVSLTCLVKGF |
| | YPSDIAVLWESYGTEWVSYKTTPPVLDSDGSFFLYSKLTVTKEEWQQ |
| | GFVFSCSVMHEALHNHYTQKSLSLSPGK (SEQ ID NO: 2172) |
| Clone CH3C.35.21.17.4 | APELLGGPSVFLFPPKPKDTLMISRTPEVTCVVVDVSHEDPEVKFNWY |
| | VDGVEVHNAKTKPREEQYNSTYRVVSVLTVLHQDWLNGKEYKCKV |
| | SNKALPAPIEKTISKAKGQPREPQVYTLPPSRDELTKNQVSLTCLVKGF |
| | YPSDIAVLWESYGTEWSSYKTTPPVLDSDGSFFLYSKLTVSKEEWQQG |
| | FVFSCSVMHEALHNHYTQKSLSLSPGK (SEQ ID NO: 2173) |
| Clone CH3C.35.21.17.5 | APELLGGPSVFLFPPKPKDTLMISRTPEVTCVVVDVSHEDPEVKFNWY |
| | VDGVEVHNAKTKPREEQYNSTYRVVSVLTVLHQDWLNGKEYKCKV |
| | SNKALPAPIEKTISKAKGQPREPQVYTLPPSRDELTKNQVSLTCLVKGF |
| | YPSDIAVLWESFGTEWASYKTTPPVLDSDGSFFLYSKLTVTKEEWQQ |
| | GFVFSCSVMHEALHNHYTQKSLSLSPGK (SEQ ID NO: 2174) |
| Clone CH3C.35.21.17.6 | APELLGGPSVFLFPPKPKDTLMISRTPEVTCVVVDVSHEDPEVKFNWY |
| | VDGVEVHNAKTKPREEQYNSTYRVVSVLTVLHQDWLNGKEYKCKV |
| | SNKALPAPIEKTISKAKGQPREPQVYTLPPSRDELTKNQVSLTCLVKGF |
| | YPSDIAVLWESFGTEWVSYKTTPPVLDSDGSFFLYSKLTVTKEEWQQ |
| | GFVFSCSVMHEALHNHYTQKSLSLSPGK (SEQ ID NO: 2175) |
| Clones | APELLGGPSVFLFPPKPKDTLMISRTPEVTCVVVDVSHEDPEVKFNWY |
| CH3C.35.N390 and | VDGVEVHNAKTKPREEQYNSTYRVVSVLTVLHQDWLNGKEYKCKV |
| CH3C.35.N163 | SNKALPAPIEKTISKAKGQPREPQVYTLPPSRDELTKNQVSLTCLVKGF |
| | YPSDIAVEWESYGTEWSNYKTTPPVLDSDGSFFLYSKLTVTKSEWQQ |
| | GFVFSCSVMHEALHNHYTQKSLSLSPGK (SEQ ID NO: 2176) |
| Clone CH3C.1 | APELLGGPSVFLFPPKPKDTLMISRTPEVTCVVVDVSHEDPEVKFNWY |
| | VDGVEVHNAKTKPREEQYNSTYRVVSVLTVLHQDWLNGKEYKCKV |
| | SNKALPAPIEKTISKAKGQPREPQVYTLPPSRDELTKNQVSLTCLVKGF |
| | YPSDIAVEWESLGLVWVGYKTTPPVLDSDGSFFLYSKLTVAKSTWQQ |
| | GWVFSCSVMHEALHNHYTQKSLSLSPGK (SEQ ID NO: 2177) |
| Clone CH3C.2 | APELLGGPSVFLFPPKPKDTLMISRTPEVTCVVVDVSHEDPEVKFNWY |
| | VDGVEVHNAKTKPREEQYNSTYRVVSVLTVLHQDWLNGKEYKCKV |
| | SNKALPAPIEKTISKAKGQPREPQVYTLPPSRDELTKNQVSLTCLVKGF |
| | YPSDIAVEWESYGTVWSHYKTTPPVLDSDGSFFLYSKLTVSKSEWQQ |
| | GYVFSCSVMHEALHNHYTQKSLSLSPGK (SEQ ID NO: 2178) |
| Clone CH3C.3 | APELLGGPSVFLFPPKPKDTLMISRTPEVTCVVVDVSHEDPEVKFNWY |
| | VDGVEVHNAKTKPREEQYNSTYRVVSVLTVLHQDWLNGKEYKCKV |
| | SNKALPAPIEKTISKAKGQPREPQVYTLPPSRDELTKNQVSLTCLVKGF |
| | YPSDIAVEWESYGTEWSQYKTTPPVLDSDGSFFLYSKLTVEKSDWQQ |
| | GHVFSCSVMHEALHNHYTQKSLSLSPGK (SEQ ID NO: 2179) |
| Clone CH3C.4 | APELLGGPSVFLFPPKPKDTLMISRTPEVTCVVVDVSHEDPEVKFNWY |
| | VDGVEVHNAKTKPREEQYNSTYRVVSVLTVLHQDWLNGKEYKCKV |
| | SNKALPAPIEKTISKAKGQPREPQVYTLPPSRDELTKNQVSLTCLVKGF |
| | YPSDIAVEWESVGTPWALYKTTPPVLDSDGSFFLYSKLTVLKSEWQQ |
| | GWVFSCSVMHEALHNHYTQKSLSLSPGK (SEQ ID NO: 2180) |
| Clone CH3C.17 | APELLGGPSVFLFPPKPKDTLMISRTPEVTCVVVDVSHEDPEVKFNWY |
| | VDGVEVHNAKTKPREEQYNSTYRVVSVLTVLHQDWLNGKEYKCKV |
| | SNKALPAPIEKTISKAKGQPREPQVYTLPPSRDELTKNQVSLTCLVKGF |
| | YPSDIAVEWESYGTVWSKYKTTPPVLDSDGSFFLYSKLTVSKSEWQQ |
| | GFVFSCSVMHEALHNHYTQKSLSLSPGK (SEQ ID NO: 2181) |
| Clone CH3C.18 | APELLGGPSVFLFPPKPKDTLMISRTPEVTCVVVDVSHEDPEVKFNWY |
| | VDGVEVHNAKTKPREEQYNSTYRVVSVLTVLHQDWLNGKEYKCKV |
| | SNKALPAPIEKTISKAKGQPREPQVYTLPPSRDELTKNQVSLTCLVKGF |
| | YPSDIAVEWESLGHVWAVYKTTPPVLDSDGSFFLYSKLTVPKSTWQQ |
| | GWVFSCSVMHEALHNHYTQKSLSLSPGK (SEQ ID NO: 2182) |
| Clone CH3C.21 | APELLGGPSVFLFPPKPKDTLMISRTPEVTCVVVDVSHEDPEVKFNWY |
| | VDGVEVHNAKTKPREEQYNSTYRVVSVLTVLHQDWLNGKEYKCKV |
| | SNKALPAPIEKTISKAKGQPREPQVYTLPPSRDELTKNQVSLTCLVKGF |
| | YPSDIAVEWESLGLVWVGYKTTPPVLDSDGSFFLYSKLTVPKSTWQQ |
| | GWVFSCSVMHEALHNHYTQKSLSLSPGK (SEQ ID NO: 2183) |
| Clone CH3C.25 | APELLGGPSVFLFPPKPKDTLMISRTPEVTCVVVDVSHEDPEVKFNWY |
| | VDGVEVHNAKTKPREEQYNSTYRVVSVLTVLHQDWLNGKEYKCKV |
| | SNKALPAPIEKTISKAKGQPREPQVYTLPPSRDELTKNQVSLTCLVKGF |
| | YPSDIAVEWESMGHVWVGYKTTPPVLDSDGSFFLYSKLTVDKSTWQ |
| | QGWVFSCSVMHEALHNHYTQKSLSLSPGK (SEQ ID NO: 2184) |
| Clone CH3C.34 | APELLGGPSVFLFPPKPKDTLMISRTPEVTCVVVDVSHEDPEVKFNWY |
| | VDGVEVHNAKTKPREEQYNSTYRVVSVLTVLHQDWLNGKEYKCKV |
| | SNKALPAPIEKTISKAKGQPREPQVYTLPPSRDELTKNQVSLTCLVKGF |
| | YPSDIAVEWESLGLVWVFSKTTPPVLDSDGSFFLYSKLTVPKSTWQQG |
| | WVFSCSVMHEALHNHYTQKSLSLSPGK (SEQ ID NO: 2185) |
| Clone CH3C.35 | APELLGGPSVFLFPPKPKDTLMISRTPEVTCVVVDVSHEDPEVKFNWY |
| | VDGVEVHNAKTKPREEQYNSTYRVVSVLTVLHQDWLNGKEYKCKV |
| | SNKALPAPIEKTISKAKGQPREPQVYTLPPSRDELTKNQVSLTCLVKGF |
| | YPSDIAVEWESYGTEWSSYKTTPPVLDSDGSFFLYSKLTVTKSEWQQG |
| | FVFSCSVMHEALHNHYTQKSLSLSPGK (SEQ ID NO: 2186) |
| Clone CH3C.44 | APELLGGPSVFLFPPKPKDTLMISRTPEVTCVVVDVSHEDPEVKFNWY |
| | VDGVEVHNAKTKPREEQYNSTYRVVSVLTVLHQDWLNGKEYKCKV |
| | SNKALPAPIEKTISKAKGQPREPQVYTLPPSRDELTKNQVSLTCLVKGF |
| | YPSDIAVEWESYGTEWSNYKTTPPVLDSDGSFFLYSKLTVSKSEWQQ |
| | GFVFSCSVMHEALHNHYTQKSLSLSPGK (SEQ ID NO: 2187) |
| Clone CH3C.51 | APELLGGPSVFLFPPKPKDTLMISRTPEVTCVVVDVSHEDPEVKFNWY |
| | VDGVEVHNAKTKPREEQYNSTYRVVSVLTVLHQDWLNGKEYKCKV |
| | SNKALPAPIEKTISKAKGQPREPQVYTLPPSRDELTKNQVSLTCLVKGF |
| | YPSDIAVEWESLGHVWVGYKTTPPVLDSDGSFFLYSKLTVSKSEWQQ |
| | GWVFSCSVMHEALHNHYTQKSLSLSPGK (SEQ ID NO: 2188) |
| Clone CH3C.3.1-3 | APELLGGPSVFLFPPKPKDTLMISRTPEVTCVVVDVSHEDPEVKFNWY |
| | VDGVEVHNAKTKPREEQYNSTYRVVSVLTVLHQDWLNGKEYKCKV |
| | SNKALPAPIEKTISKAKGQPREPQVYTLPPSRDELTKNQVSLTCLVKGF |
| | YPSDIAVEWESLGHVWVATKTTPPVLDSDGSFFLYSKLTVPKSTWQQ |
| | GWVFSCSVMHEALHNHYTQKSLSLSPGK (SEQ ID NO: 2189) |
| Clone CH3C.3.1-9 | APELLGGPSVFLFPPKPKDTLMISRTPEVTCVVVDVSHEDPEVKFNWY |
| | VDGVEVHNAKTKPREEQYNSTYRVVSVLTVLHQDWLNGKEYKCKV |
| | SNKALPAPIEKTISKAKGQPREPQVYTLPPSRDELTKNQVSLTCLVKGF |
| | YPSDIAVEWESLGPVWVHTKTTPPVLDSDGSFFLYSKLTVPKSTWQQ |
| | GWVFSCSVMHEALHNHYTQKSLSLSPGK (SEQ ID NO: 2190) |
| Clone CH3C.3.2-5 | APELLGGPSVFLFPPKPKDTLMISRTPEVTCVVVDVSHEDPEVKFNWY |
| | VDGVEVHNAKTKPREEQYNSTYRVVSVLTVLHQDWLNGKEYKCKV |
| | SNKALPAPIEKTISKAKGQPREPQVYTLPPSRDELTKNQVSLTCLVKGF |
| | YPSDIAVEWESLGHVWVDQKTTPPVLDSDGSFFLYSKLTVPKSTWQQ |
| | GWVFSCSVMHEALHNHYTQKSLSLSPGK (SEQ ID NO: 2191) |
| Clone CH3C.3.2-19 | APELLGGPSVFLFPPKPKDTLMISRTPEVTCVVVDVSHEDPEVKFNWY |
| | VDGVEVHNAKTKPREEQYNSTYRVVSVLTVLHQDWLNGKEYKCKV |
| | SNKALPAPIEKTISKAKGQPREPQVYTLPPSRDELTKNQVSLTCLVKGF |
| | YPSDIAVEWESLGHVWVNQKTTPPVLDSDGSFFLYSKLTVPKSTWQQ |
| | GWVFSCSVMHEALHNHYTQKSLSLSPGK (SEQ ID NO: 2192) |
| Clone CH3C.3.2-1 | APELLGGPSVFLFPPKPKDTLMISRTPEVTCVVVDVSHEDPEVKFNWY |
| | VDGVEVHNAKTKPREEQYNSTYRVVSVLTVLHQDWLNGKEYKCKV |
| | SNKALPAPIEKTISKAKGQPREPQVYTLPPSRDELTKNQVSLTCLVKGF |
| | YPSDIAVEWESLGHVWVNFKTTPPVLDSDGSFFLYSKLTVPKSTWQQ |
| | GWVFSCSVMHEALHNHYTQKSLSLSPGK (SEQ ID NO: 2193) |
| Clone CH3C.18 | APELLGGPSVFLFPPKPKDTLMISRTPEVTCVVVDVSHEDPEVKFNWY |
| variant | VDGVEVHNAKTKPREEQYNSTYRVVSVLTVLHQDWLNGKEYKCKV |
| | SNKALPAPIEKTISKAKGQPREPQVYTLPPSRDELTKNQVSLTCLVKGF |
| | YPSDIAVWWESLGHVWAVYKTTPPVLDSDGSFFLYSKLTVPKSTWQQ |
| | GWVFSCSVMHEALHNHYTQKSLSLSPGK (SEQ ID NO: 2194) |
| Clone CH3C.18 | APELLGGPSVFLFPPKPKDTLMISRTPEVTCVVVDVSHEDPEVKFNWY |
| variant | VDGVEVHNAKTKPREEQYNSTYRVVSVLTVLHQDWLNGKEYKCKV |
| | SNKALPAPIEKTISKAKGQPREPQVYTLPPSRDELTKNQVSLTCLVKGF |
| | YPSDIAVLWESLGHVWAVYKTTPPVLDSDGSFFLYSKLTVPKSTWQQ |
| | GWVFSCSVMHEALHNHYTQKSLSLSPGK (SEQ ID NO: 2195) |
| Clone CH3C.18 | APELLGGPSVFLFPPKPKDTLMISRTPEVTCVVVDVSHEDPEVKFNWY |
| variant | VDGVEVHNAKTKPREEQYNSTYRVVSVLTVLHQDWLNGKEYKCKV |
| | SNKALPAPIEKTISKAKGQPREPQVYTLPPSRDELTKNQVSLTCLVKGF |
| | YPSDIAVYWESLGHVWAVYKTTPPVLDSDGSFFLYSKLTVPKSTWQQ |
| | GWVFSCSVMHEALHNHYTQKSLSLSPGK (SEQ ID NO: 2196) |
| Clone CH3C.18 | APELLGGPSVFLFPPKPKDTLMISRTPEVTCVVVDVSHEDPEVKFNWY |
| variant | VDGVEVHNAKTKPREEQYNSTYRVVSVLTVLHQDWLNGKEYKCKV |
| | SNKALPAPIEKTISKAKGQPREPQVYTLPPSRDELTKNQVSLTCLVKGF |
| | YPSDIAVEWESLGHVWAVYQTTPPVLDSDGSFFLYSKLTVPKSTWQQ |
| | GWVFSCSVMHEALHNHYTQKSLSLSPGK (SEQ ID NO: 2197) |
| Clone CH3C.18 | APELLGGPSVFLFPPKPKDTLMISRTPEVTCVVVDVSHEDPEVKFNWY |
| variant | VDGVEVHNAKTKPREEQYNSTYRVVSVLTVLHQDWLNGKEYKCKV |
| | SNKALPAPIEKTISKAKGQPREPQVYTLPPSRDELTKNQVSLTCLVKGF |
| | YPSDIAVEWESLGHVWAVYFTTPPVLDSDGSFFLYSKLTVPKSTWQQ |
| | GWVFSCSVMHEALHNHYTQKSLSLSPGK (SEQ ID NO: 2198) |
| Clone CH3C.18 | APELLGGPSVFLFPPKPKDTLMISRTPEVTCVVVDVSHEDPEVKFNWY |
| variant | VDGVEVHNAKTKPREEQYNSTYRVVSVLTVLHQDWLNGKEYKCKV |
| | SNKALPAPIEKTISKAKGQPREPQVYTLPPSRDELTKNQVSLTCLVKGF |
| | YPSDIAVEWESLGHVWAVYHTTPPVLDSDGSFFLYSKLTVPKSTWQQ |
| | GWVFSCSVMHEALHNHYTQKSLSLSPGK (SEQ ID NO: 2199) |
| Clone CH3C.35.13 | APELLGGPSVFLFPPKPKDTLMISRTPEVTCVVVDVSHEDPEVKFNWY |
| | VDGVEVHNAKTKPREEQYNSTYRVVSVLTVLHQDWLNGKEYKCKV |
| | SNKALPAPIEKTISKAKGQPREPQVYTLPPSRDELTKNQVSLTCLVKGF |
| | YPSDIAVWWESLGHVWAVYKTTPPVLDSDGSFFLYSKLTVPKSTWQQ |
| | GWVFSCSVMHEALHNHYTQKSLSLSPGK (SEQ ID NO: 2200) |
| Clone CH3C.35.14 | APELLGGPSVFLFPPKPKDTLMISRTPEVTCVVVDVSHEDPEVKFNWY |
| | VDGVEVHNAKTKPREEQYNSTYRVVSVLTVLHQDWLNGKEYKCKV |
| | SNKALPAPIEKTISKAKGQPREPQVYTLPPSRDELTKNQVSLTCLVKGF |
| | YPSDIAVEWESLGHVWAVYQTTPPVLDSDGSFFLYSKLTVPKSTWQQ |
| | GWVFSCSVMHEALHNHYTQKSLSLSPGK (SEQ ID NO: 2201) |
| Clone CH3C.35.15 | APELLGGPSVFLFPPKPKDTLMISRTPEVTCVVVDVSHEDPEVKFNWY |
| | VDGVEVHNAKTKPREEQYNSTYRVVSVLTVLHQDWLNGKEYKCKV |
| | SNKALPAPIEKTISKAKGQPREPQVYTLPPSRDELTKNQVSLTCLVKGF |
| | YPSDIAVWWESLGHVWAVYQTTPPVLDSDGSFFLYSKLTVPKSTWQQ |
| | GWVFSCSVMHEALHNHYTQKSLSLSPGK (SEQ ID NO: 2202) |
| Clone CH3C.35.16 | APELLGGPsVFLFPPKPKDTLMISRTPEVTCVVVDVSHEDPEVKFNWY |
| | VDGVEVHNAKTKPREEQYNSTYRVVSVLTVLHQDWLNGKEYKCKV |
| | SNKALPAPIEKTISKAKGQPREPQVYTLPPSRDELTKNQVSLTCLVKGF |
| | YPSDIAVWWESLGHVWVNQKTTPPVLDSDGSFFLYSKLTVPKSTWQQ |
| | GWVFSCSVMHEALHNHYTQKSLSLSPGK (SEQ ID NO: 2203) |
| Clone CH3C.35.17 | APELLGGPSVFLFPPKPKDTLMISRTPEVTCVVVDVSHEDPEVKFNWY |
| | VDGVEVHNAKTKPREEQYNSTYRVVSVLTVLHQDWLNGKEYKCKV |
| | SNKALPAPIEKTISKAKGQPREPQVYTLPPSRDELTKNQVSLTCLVKGF |
| | YPSDIAVEWESLGHVWVNQQTTPPVLDSDGSFFLYSKLTVPKSTWQQ |
| | GWVFSCSVMHEALHNHYTQKSLSLSPGK (SEQ ID NO: 2204) |
| Clone CH3C.35.18 | APELLGGPSVFLFPPKPKDTLMISRTPEVTCVVVDVSHEDPEVKFNWY |
| | VDGVEVHNAKTKPREEQYNSTYRVVSVLTVLHQDWLNGKEYKCKV |
| | SNKALPAPIEKTISKAKGQPREPQVYTLPPSRDELTKNQVSLTCLVKGF |
| | YPSDIAVWWESLGHVWVNQQTTPPVLDSDGSFFLYSKLTVPKSTWQQ |
| | GWVFSCSVMHEALHNHYTQKSLSLSPGK (SEQ ID NO: 2205) |
| Clone CH3C.35.19 | APELLGGPSVFLFPPKPKDTLMISRTPEVTCVVVDVSHEDPEVKFNWY |
| | VDGVEVHNAKTKPREEQYNSTYRVVSVLTVLHQDWLNGKEYKCKV |
| | SNKALPAPIEKTISKAKGQPREPQVYTLPPSRDELTKNQVSLTCLVKGF |
| | YPSDIAVWWESYGTEWSSYKTTPPVLDSDGSFFLYSKLTVTKSEWQQ |
| | GFVFSCSVMHEALHNHYTQKSLSLSPGK (SEQ ID NO: 2206) |
| Clone | APELLGGPSVFLFPPKPKDTLMISRTPEVTCVVVDVSHEDPEVKFNWY |
| CH3C.35.K165Q | VDGVEVHNAKTKPREEQYNSTYRVVSVLTVLHQDWLNGKEYKCKV |
| | SNKALPAPIEKTISKAKGQPREPQVYTLPPSRDELTKNQVSLTCLVKGF |
| | YPSDIAVEWESYGTEWSSYQTTPPVLDSDGSFFLYSKLTVTKSEWQQG |
| | FVFSCSVMHEALHNHYTQKSLSLSPGK (SEQ ID NO: 2207) |
| Clone | APELLGGPSVFLFPPKPKDTLMISRTPEVTCVVVDVSHEDPEVKFNWY |
| CH3C.35.N163.K165Q | VDGVEVHNAKTKPREEQYNSTYRVVSVLTVLHQDWLNGKEYKCKV |
| | SNKALPAPIEKTISKAKGQPREPQVYTLPPSRDELTKNQVSLTCLVKGF |
| | YPSDIAVEWESYGTEWSNYQTTPPVLDSDGSFFLYSKLTVTKSEWQQ |
| | GFVFSCSVMHEALHNHYTQKSLSLSPGK (SEQ ID NO: 2208) |
| Clone CH3C.35.21.1 | APELLGGPSVFLFPPKPKDTLMISRTPEVTCVVVDVSHEDPEVKFNWY |
| | VDGVEVHNAKTKPREEQYNSTYRVVSVLTVLHQDWLNGKEYKCKV |
| | SNKALPAPIEKTISKAKGQPREPQVYTLPPSRDELTKNQVSLTCLVKGF |
| | YPSDIAVLWESYGTEWSSYKTTPPVLDSDGSFFLYSKLTVTKSEWQQG |
| | FVFSCSVMHEALHNHYTQKSLSLSPGK (SEQ ID NO: 2209) |
| Clone CH3C.35.21.2 | APELLGGPSVFLFPPKPKDTLMISRTPEVTCVVVDVSHEDPEVKFNWY |
| | VDGVEVHNAKTKPREEQYNSTYRVVSVLTVLHQDWLNGKEYKCKV |
| | SNKALPAPIEKTISKAKGQPREPQVYTLPPSRDELTKNQVSLTCLVKGF |
| | YPSDIAVLWESYGTEWSSYRTTPPVLDSDGSFFLYSKLTVTKSEWQQG |
| | FVFSCSVMHEALHNHYTQKSLSLSPGK (SEQ ID NO: 2210) |
| Clone CH3C.35.21.3 | APELLGGPSVFLFPPKPKDTLMISRTPEVTCVVVDVSHEDPEVKFNWY |
| | VDGVEVHNAKTKPREEQYNSTYRVVSVLTVLHQDWLNGKEYKCKV |
| | SNKALPAPIEKTISKAKGQPREPQVYTLPPSRDELTKNQVSLTCLVKGF |
| | YPSDIAVLWESYGTEWSSYRTTPPVLDSDGSFFLYSKLTVTREEWQQG |
| | FVFSCSVMHEALHNHYTQKSLSLSPGK (SEQ ID NO: 2211) |
| Clone CH3C.35.21.4 | APELLGGPSVFLFPPKPKDTLMISRTPEVTCVVVDVSHEDPEVKFNWY |
| | VDGVEVHNAKTKPREEQYNSTYRVVSVLTVLHQDWLNGKEYKCKV |
| | SNKALPAPIEKTISKAKGQPREPQVYTLPPSRDELTKNQVSLTCLVKGF |
| | YPSDIAVLWESYGTEWSSYRTTPPVLDSDGSFFLYSKLTVTGEEWQQG |
| | FVFSCSVMHEALHNHYTQKSLSLSPGK (SEQ ID NO: 2212) |
| Clone CH3C.35.21.5 | APELLGGPSVFLFPPKPKDTLMISRTPEVTCVVVDVSHEDPEVKFNWY |
| | VDGVEVHNAKTKPREEQYNSTYRVVSVLTVLHQDWLNGKEYKCKV |
| | SNKALPAPIEKTISKAKGQPREPQVYTLPPSRDELTKNQVSLTCLVKGF |
| | YPSDIAVLWESYGTEWSSYRTTPPVLDSDGSFFLYSKLTVTREEWQQG |
| | FVFSCWVMHEALHNHYTQKSLSLSPGK (SEQ ID NO: 2213) |
| Clone CH3C.35.21.6 | APELLGGPSVFLFPPKPKDTLMISRTPEVTCVVVDVSHEDPEVKFNWY |
| | VDGVEVHNAKTKPREEQYNSTYRVVSVLTVLHQDWLNGKEYKCKV |
| | SNKALPAPIEKTISKAKGQPREPQVYTLPPSRDELTKNQVSLTCLVKGF |
| | YPSDIAVLWESYGTEWSSYRTTPPVLDSDGSFFLYSKLTVTKEEWQQG |
| | FVFSCWVMHEALHNHYTQKSLSLSPGK (SEQ ID NO: 2214) |
| Clone CH3C.35.21.7 | APELLGGPSVFLFPPKPKDTLMISRTPEVTCVVVDVSHEDPEVKFNWY |
| | VDGVEVHNAKTKPREEQYNSTYRVVSVLTVLHQDWLNGKEYKCKV |
| | SNKALPAPIEKTISKAKGQPREPQVYTLPPSRDELTKNQVSLTCLVKGF |
| | YPSDIAVLWESYGTEWSSYRTTPPVLDSDGSFFLYSKLTVTREEWQQG |
| | FVFTCWVMHEALHNHYTQKSLSLSPGK (SEQ ID NO: 2215) |
| Clone CH3C.35.21.8 | APELLGGPSVFLFPPKPKDTLMISRTPEVTCVVVDVSHEDPEVKFNWY |
| | VDGVEVHNAKTKPREEQYNSTYRVVSVLTVLHQDWLNGKEYKCKV |
| | SNKALPAPIEKTISKAKGQPREPQVYTLPPSRDELTKNQVSLTCLVKGF |
| | YPSDIAVLWESYGTEWSSYRTTPPVLDSDGSFFLYSKLTVTREEWQQG |
| | FVFTCGVMHEALHNHYTQKSLSLSPGK (SEQ ID NO: 2216) |
| Clone CH3C.35.21.9 | APELLGGPSVFLFPPKPKDTLMISRTPEVTCVVVDVSHEDPEVKFNWY |
| | VDGVEVHNAKTKPREEQYNSTYRVVSVLTVLHQDWLNGKEYKCKV |
| | SNKALPAPIEKTISKAKGQPREPQVYTLPPSRDELTKNQVSLTCLVKGF |
| | YPSDIAVLWESYGTEWSSYRTTPPVLDSDGSFFLYSKLTVTREEWQQG |
| | FVFECWVMHEALHNHYTQKSLSLSPGK (SEQ ID NO: 2217) |
| Clone CH3C.35.21.10 | APELLGGPSVFLFPPKPKDTLMISRTPEVTCVVVDVSHEDPEVKFNWY |
| | VDGVEVHNAKTKPREEQYNSTYRVVSVLTVLHQDWLNGKEYKCKV |
| | SNKALPAPIEKTISKAKGQPREPQVYTLPPSRDELTKNQVSLTCLVKGF |
| | YPSDIAVLWESYGTEWSSYRTTPPVLDSDGSFFLYSKLTVTREEWQQG |
| | FVFKCWVMHEALHNHYTQKSLSLSPGK (SEQ ID NO: 2218) |
| Clone CH3C.35.21.il | APELLGGPSVFLFPPKPKDTLMISRTPEVTCVVVDVSHEDPEVKFNWY |
| | VDGVEVHNAKTKPREEQYNSTYRVVSVLTVLHQDWLNGKEYKCKV |
| | SNKALPAPIEKTISKAKGQPREPQVYTLPPSRDELTKNQVSLTCLVKGF |
| | YPSDIAVLWESYGTEWSSYRTTPPVLDSDGSFFLYSKLTVTPEEWQQG |
| | FVFKCWVMHEALHNHYTQKSLSLSPGK (SEQ ID NO: 2219) |
| Clone CH3C.35.21.12 | APELLGGPSVFLFPPKPKDTLMISRTPEVTCVVVDVSHEDPEVKFNWY |
| | VDGVEVHNAKTKPREEQYNSTYRVVSVLTVLHQDWLNGKEYKCKV |
| | SNKALPAPIEKTISKAKGQPREPQVYTLPPSRDELTKNQVSLTCLVKGF |
| | YPSDIAVWWESYGTEWSSYRTTPPVLDSDGSFFLYSKLTVTREEWQQ |
| | GFVFSCSVMHEALHNHYTQKSLSLSPGK (SEQ ID NO: 2220) |
| Clone CH3C.35.21.13 | APELLGGPSVFLFPPKPKDTLMISRTPEVTCVVVDVSHEDPEVKFNWY |
| | VDGVEVHNAKTKPREEQYNSTYRVVSVLTVLHQDWLNGKEYKCKV |
| | SNKALPAPIEKTISKAKGQPREPQVYTLPPSRDELTKNQVSLTCLVKGF |
| | YPSDIAVWWESYGTEWSSYRTTPPVLDSDGSFFLYSKLTVTGEEWQQ |
| | GFVFSCSVMHEALHNHYTQKSLSLSPGK (SEQ ID NO: 2221) |
| Clone CH3C.35.21.14 | APELLGGPSVFLFPPKPKDTLMISRTPEVTCVVVDVSHEDPEVKFNWY |
| | VDGVEVHNAKTKPREEQYNSTYRVVSVLTVLHQDWLNGKEYKCKV |
| | SNKALPAPIEKTISKAKGQPREPQVYTLPPSRDELTKNQVSLTCLVKGF |
| | YPSDIAVWWESYGTEWSSYRTTPPVLDSDGSFFLYSKLTVTREEWQQ |
| | GFVFTCWVMHEALHNHYTQKSLSLSPGK (SEQ ID NO: 2222) |
| Clone CH3C.35.21.15 | APELLGGPSVFLFPPKPKDTLMISRTPEVTCVVVDVSHEDPEVKFNWY |
| | VDGVEVHNAKTKPREEQYNSTYRVVSVLTVLHQDWLNGKEYKCKV |
| | SNKALPAPIEKTISKAKGQPREPQVYTLPPSRDELTKNQVSLTCLVKGF |
| | YPSDIAVWWESYGTEWSSYRTTPPVLDSDGSFFLYSKLTVTGEEWQQ |
| | GFVFTCWVMHEALHNHYTQKSLSLSPGK (SEQ ID NO: 2223) |
| Clone CH3C.35.21.16 | APELLGGPSVFLFPPKPKDTLMISRTPEVTCVVVDVSHEDPEVKFNWY |
| | VDGVEVHNAKTKPREEQYNSTYRVVSVLTVLHQDWLNGKEYKCKV |
| | SNKALPAPIEKTISKAKGQPREPQVYTLPPSRDELTKNQVSLTCLVKGF |
| | YPSDIAVWWESYGTEWSSYRTTPPVLDSDGSFFLYSKLTVTREEWQQ |
| | GFVFTCGVMHEALHNHYTQKSLSLSPGK (SEQ ID NO: 2224) |
| Clone CH3C.35.21.18 | APELLGGPSVFLFPPKPKDTLMISRTPEVTCVVVDVSHEDPEVKFNWY |
| | VDGVEVHNAKTKPREEQYNSTYRVVSVLTVLHQDWLNGKEYKCKV |
| | SNKALPAPIEKTISKAKGQPREPQVYTLPPSRDELTKNQVSLTCLVKGF |
| | YPSDIAVLWESYGTEWSSYRTTPPVLDSDGSFFLYSKLTVTKEEWQQG |
| | FVFSCSVMHEALHNHYTQKSLSLSPGK (SEQ ID NO: 2225) |
| Clone CH3B.1 | APELLGGPSVFLFPPKPKDTLMISRTPEVTCVVVDVSHEDPEVKFNWY |
| | VDGVEVHNAKTKPREEQYNSTYRVVSVLTVLHQDWLNGKEYKCKV |
| | SNKALPAPIEKTISKAKGQPRFDYVTTLPPSRDELTKNQVSLTCLVKGF |
| | YPSDIAVEWESNGQPENNYKTTPPVLDSDGSFFLYSKLTVDKSRWQQ |
| | GNVFSCSVMHEALHNHYGFHDLSLSPGK (SEQ ID NO: 2226) |
| Clone CH3B.2 | APELLGGPSVFLFPPKPKDTLMISRTPEVTCVVVDVSHEDPEVKFNWY |
| | VDGVEVHNAKTKPREEQYNSTYRVVSVLTVLHQDWLNGKEYKCKV |
| | SNKALPAPIEKTISKAKGQPRFDMVTTLPPSRDELTKNQVSLTCLVKGF |
| | YPSDIAVEWESNGQPENNYKTTPPVLDSDGSFFLYSKLTVDKSRWQQ |
| | GNVFSCSVMHEALHNHYGFHDLSLSPGK (SEQ ID NO: 2227) |
| Clone CH3B.3 | APELLGGPSVFLFPPKPKDTLMISRTPEVTCVVVDVSHEDPEVKFNWY |
| | VDGVEVHNAKTKPREEQYNSTYRVVSVLTVLHQDWLNGKEYKCKV |
| | SNKALPAPIEKTISKAKGQPRFEYVTTLPPSRDELTKNQVSLTCLVKGF |
| | YPSDIAVEWESNGQPENNYKTTPPVLDSDGSFFLYSKLTVDKSRWQQ |
| | GNVFSCSVMHEALHNHYGFHDLSLSPGK (SEQ ID NO: 2228) |
| Clone CH3B.4 | APELLGGPSVFLFPPKPKDTLMISRTPEVTCVVVDVSHEDPEVKFNWY |
| | VDGVEVHNAKTKPREEQYNSTYRVVSVLTVLHQDWLNGKEYKCKV |
| | SNKALPAPIEKTISKAKGQPRFEMVTTLPPSRDELTKNQVSLTCLVKGF |
| | YPSDIAVEWESNGQPENNYKTTPPVLDSDGSFFLYSKLTVDKSRWQQ |
| | GNVFSCSVMHEALHNHYGFHDLSLSPGK (SEQ ID NO: 2229) |
| Clone CH3B.5 | APELLGGPSVFLFPPKPKDTLMISRTPEVTCVVVDVSHEDPEVKFNWY |
| | VDGVEVHNAKTKPREEQYNSTYRVVSVLTVLHQDWLNGKEYKCKV |
| | SNKALPAPIEKTISKAKGQPRFELVTTLPPSRDELTKNQVSLTCLVKGF |
| | YPSDIAVEWESNGQPENNYKTTPPVLDSDGSFFLYSKLTVDKSRWQQ |
| | GNVFSCSVMHEALHNHYGFHDLSLSPGK (SEQ ID NO: 2230) |
| Clone CH2A2.1 | APELLGGPSVFLFPPKPKDTLMISRTPEVTCVVVDVSHEDPEVEFIWYV |
| | DGVDVRYEWQLPREEQYNSTYRVVSVLTVLHQDWLNGKEYKCKVS |
| | NKALPAPIEKTISKAKGQPREPQVYTLPPSRDELTKNQVSLTCLVKGFY |
| | PSDIAVEWESNGQPENNYKTTPPVLDSDGSFFLYSKLTVDKSRWQQG |
| | NVFSCSVMHEALHNHYTQKSLSLSPGK (SEQ ID NO: 2231) |
| Clone CH2A2.2 | APELLGGPSVFLFPPKPKDTLMISRTPEVTCVVVDVSHEDPEVGFVWY |
| | VDGVPVSWEWYWPREEQYNSTYRVVSVLTVLHQDWLNGKEYKCKV |
| | SNKALPAPIEKTISKAKGQPREPQVYTLPPSRDELTKNQVSLTCLVKGF |
| | YPSDIAVEWESNGQPENNYKTTPPVLDSDGSFFLYSKLTVDKSRWQQ |
| | GNVFSCSVMHEALHNHYTQKSLSLSPGK (SEQ ID NO: 2232) |
| Clone CH2A2.3 | APELLGGPSVFLFPPKPKDTLMISRTPEVTCVVVDVSHEDPEVQFDWY |
| | VDGVMVRREWHRPREEQYNSTYRVVSVLTVLHQDWLNGKEYKCKV |
| | SNKALPAPIEKTISKAKGQPREPQVYTLPPSRDELTKNQVSLTCLVKGF |
| | YPSDIAVEWESNGQPENNYKTTPPVLDSDGSFFLYSKLTVDKSRWQQ |
| | GNVFSCSVMHEALHNHYTQKSLSLSPGK (SEQ ID NO: 2233) |
| Clone CH2A2.4 | APELLGGPSVFLFPPKPKDTLMISRTPEVTCVVVDVSHEDPEVSFEWY |
| | VDGVPVRWEWQWPREEQYNSTYRVVSVLTVLHQDWLNGKEYKCK |
| | VSNKALPAPIEKTISKAKGQPREPQVYTLPPSRDELTKNQVSLTCLVKG |
| | FYPSDIAVEWESNGQPENNYKTTPPVLDSDGSFFLYSKLTVDKSRWQ |
| | QGNVFSCSVMHEALHNHYTQKSLSLSPGK (SEQ ID NO: 2234) |
| Clone CH2A2.5 | APELLGGPSVFLFPPKPKDTLMISRTPEVTCVVVDVSHEDPEVAFTWY |
| | VDGVPVRWEWQNPREEQYNSTYRVVSVLTVLHQDWLNGKEYKCKV |
| | SNKALPAPIEKTISKAKGQPREPQVYTLPPSRDELTKNQVSLTCLVKGF |
| | YPSDIAVEWESNGQPENNYKTTPPVLDSDGSFFLYSKLTVDKSRWQQ |
| | GNVFSCSVMHEALHNHYTQKSLSLSPGK (SEQ ID NO: 2235) |
| Clone CH2C.1 | APELLGGPSVFLFPPKPKDTLMISRTPEVTCVVVDPQTPPWEVKFNWY |
| | VDGVEVHNAKTKPREEEYYTYYRVVSVLTVLHQDWLNGKEYKCKV |
| | SNKALPAPIEKTISKAKGQPREPQVYTLPPSRDELTKNQVSLTCLVKGF |
| | YPSDIAVEWESNGQPENNYKTTPPVLDSDGSFFLYSKLTVDKSRWQQ |
| | GNVFSCSVMHEALHNHYTQKSLSLSPGK (SEQ ID NO: 2236) |
| Clone CH2C.2 | APELLGGPSVFLFPPKPKDTLMISRTPEVTCVVVDPPSPPWEVKFNWY |
| | VDGVEVHNAKTKPREEEYYSNYRVVSVLTVLHQDWLNGKEYKCKV |
| | SNKALPAPIEKTISKAKGQPREPQVYTLPPSRDELTKNQVSLTCLVKGF |
| | YPSDIAVEWESNGQPENNYKTTPPVLDSDGSFFLYSKLTVDKSRWQQ |
| | GNVFSCSVMHEALHNHYTQKSLSLSPGK (SEQ ID NO: 2237) |
| Clone CH2C.3 | APELLGGPSVFLFPPKPKDTLMISRTPEVTCVVVDPQTPPWEVKFNWY |
| | VDGVEVHNAKTKPREEEYYSNYRVVSVLTVLHQDWLNGKEYKCKV |
| | SNKALPAPIEKTISKAKGQPREPQVYTLPPSRDELTKNQVSLTCLVKGF |
| | YPSDIAVEWESNGQPENNYKTTPPVLDSDGSFFLYSKLTVDKSRWQQ |
| | GNVFSCSVMHEALHNHYTQKSLSLSPGK (SEQ ID NO: 2238) |
| Clone CH2C.4 | APELLGGPSVFLFPPKPKDTLMISRTPEVTCVVVDFRGPPWEVKFNWY |
| | VDGVEVHNAKTKPREEEYYHDYRVVSVLTVLHQDWLNGKEYKCKV |
| | SNKALPAPIEKTISKAKGQPREPQVYTLPPSRDELTKNQVSLTCLVKGF |
| | YPSDIAVEWESNGQPENNYKTTPPVLDSDGSFFLYSKLTVDKSRWQQ |
| | GNVFSCSVMHEALHNHYTQKSLSLSPGK (SEQ ID NO: 2239) |
| Clone CH2C.5 | APELLGGPSVFLFPPKPKDTLMISRTPEVTCVVVDPQTVPWEVKFNWY |
| | VDGVEVHNAKTKPREEEYYSNYRVVSVLTVLHQDWLNGKEYKCKV |
| | SNKALPAPIEKTISKAKGQPREPQVYTLPPSRDELTKNQVSLTCLVKGF |
| | YPSDIAVEWESNGQPENNYKTTPPVLDSDGSFFLYSKLTVDKSRWQQ |
| | GNVFSCSVMHEALHNHYTQKSLSLSPGK (SEQ ID NO: 2240) |
| Clone CH2D.1 | APELLGGPSVFLFPPKPKDTLMISRTPEVTCVVVDVSVPPRMVKFNWY |
| | VDGVEVHNAKTKSLTSQHNSTVRVVSVLTVLHQDWLNGKEYKCKVS |
| | NKALPAPIEKTISKAKGQPREPQVYTLPPSRDELTKNQVSLTCLVKGFY |
| | PSDIAVEWESNGQPENNYKTTPPVLDSDGSFFLYSKLTVDKSRWQQG |
| | NVFSCSVMHEALHNHYTQKSLSLSPGK (SEQ ID NO: 2241) |
| Clone CH2D.2 | APELLGGPSVFLFPPKPKDTLMISRTPEVTCVVVDVSVPPWMVKFNW |
| | YVDGVEVHNAKTKSLTSQHNSTVRVVSVLTVLHQDWLNGKEYKCK |
| | VSNKALPAPIEKTISKAKGQPREPQVYTLPPSRDELTKNQVSLTCLVKG |
| | FYPSDIAVEWESNGQPENNYKTTPPVLDSDGSFFLYSKLTVDKSRWQ |
| | QGNVFSCSVMHEALHNHYTQKSLSLSPGK (SEQ ID NO: 2242) |
| Clone CH2D.3 | APELLGGPSVFLFPPKPKDTLMISRTPEVTCVVVDVSDMWEYVKFNW |
| | YVDGVEVHNAKTKPWVKQLNSTWRVVSVLTVLHQDWLNGKEYKC |
| | KVSNKALPAPIEKTISKAKGQPREPQVYTLPPSRDELTKNQVSLTCLVK |
| | GFYPSDIAVEWESNGQPENNYKTTPPVLDSDGSFFLYSKLTVDKSRW |
| | QQGNVFSCSVMHEALHNHYTQKSLSLSPGK (SEQ ID NO: 2243) |
| Clone CH2D.4 | APELLGGPSVFLFPPKPKDTLMISRTPEVTCVVVDVSDDWTWVKFNW |
| | YVDGVEVHNAKTKPWIAQPNSTWRVVSVLTVLHQDWLNGKEYKCK |
| | VSNKALPAPIEKTISKAKGQPREPQVYTLPPSRDELTKNQVSLTCLVKG |
| | FYPSDIAVEWESNGQPENNYKTTPPVLDSDGSFFLYSKLTVDKSRWQ |
| | QGNVFSCSVMHEALHNHYTQKSLSLSPGK (SEQ ID NO: 2244) |
| Clone CH2D.5 | APELLGGPSVFLFPPKPKDTLMISRTPEVTCVVVDVSDDWEWVKFNW |
| | YVDGVEVHNAKTKPWKLQLNSTWRVVSVLTVLHQDWLNGKEYKCK |
| | VSNKALPAPIEKTISKAKGQPREPQVYTLPPSRDELTKNQVSLTCLVKG |
| | FYPSDIAVEWESNGQPENNYKTTPPVLDSDGSFFLYSKLTVDKSRWQ |
| | QGNVFSCSVMHEALHNHYTQKSLSLSPGK (SEQ ID NO: 2245) |
| Clone CH2E3.1 | APELLGGPSVFLFPPKPKDTLMISRTPEVTCVVVDVSHEDPWVWFYW |
| | YVDGVEVHNAKTKPREEQYNSTYRVVSVLTVLHQDWLNGKEYKCS |
| | VVNIALWWSIEKTISKAKGQPREPQVYTLPPSRDELTKNQVSLTCLVK |
| | GFYPSDIAVEWESNGQPENNYKTTPPVLDSDGSFFLYSKLTVDKSRW |
| | QQGNVFSCSVMHEALHNHYTQKSLSLSPGK (SEQ ID NO: 2246) |
| Clone CH2E3.2 | APELLGGPSVFLFPPKPKDTLMISRTPEVTCVVVDVSHEDPVVGFRWY |
| | VDGVEVHNAKTKPREEQYNSTYRVVSVLTVLHQDWLNGKEYKCRVS |
| | NSALTWKIEKTISKAKGQPREPQVYTLPPSRDELTKNQVSLTCLVKGF |
| | YPSDIAVEWESNGQPENNYKTTPPVLDSDGSFFLYSKLTVDKSRWQQ |
| | GNVFSCSVMHEALHNHYTQKSLSLSPGK (SEQ ID NO: 2247) |
| Clone CH2E3.3 | APELLGGPSVFLFPPKPKDTLMISRTPEVTCVVVDVSHEDPVVGFRWY |
| | VDGVEVHNAKTKPREEQYNSTYRVVSVLTVLHQDWLNGKEYKCRVS |
| | NSALSWRIEKTISKAKGQPREPQVYTLPPSRDELTKNQVSLTCLVKGF |
| | YPSDIAVEWESNGQPENNYKTTPPVLDSDGSFFLYSKLTVDKSRWQQ |
| | GNVFSCSVMHEALHNHYTQKSLSLSPGK (SEQ ID NO: 2248) |
| Clone CH2E3.4 | APELLGGPSVFLFPPKPKDTLMISRTPEVTCVVVDVSHEDPIVGFRWY |
| | VDGVEVHNAKTKPREEQYNSTYRVVSVLTVLHQDWLNGKEYKCRVS |
| | NSALRWRIEKTISKAKGQPREPQVYTLPPSRDELTKNQVSLTCLVKGF |
| | YPSDIAVEWESNGQPENNYKTTPPVLDSDGSFFLYSKLTVDKSRWQQ |
| | GNVFSCSVMHEALHNHYTQKSLSLSPGK (SEQ ID NO: 2249) |
| Clone CH2E3.5 | APELLGGPSVFLFPPKPKDTLMISRTPEVTCVVVDVSHEDPAVGFEWY |
| | VDGVEVHNAKTKPREEQYNSTYRVVSVLTVLHQDWLNGKEYKCQV |
| | FNWALDWVIEKTISKAKGQPREPQVYTLPPSRDELTKNQVSLTCLVK |
| | GFYPSDIAVEWESNGQPENNYKTTPPVLDSDGSFFLYSKLTVDKSRW |
| | QQGNVFSCSVMHEALHNHYTQKSLSLSPGK (SEQ ID NO: 2250) |
| Fc sequence with hole | APELLGGPSVFLFPPKPKDTLMISRTPEVTCVVVDVSHEDPEVKFNWY |
| mutations | VDGVEVHNAKTKPREEQYNSTYRVVSVLTVLHQDWLNGKEYKCKV |
| | SNKALPAPIEKTISKAKGQPREPQVYTLPPSRDELTKNQVSLSCAVKGF |
| | YPSDIAVEWESNGQPENNYKTTPPVLDSDGSFFLVSKLTVDKSRWQQ |
| | GNVFSCSVMHEALHNHYTQKSLSLSPGK (SEQ ID NO: 2251) |
| Fc sequence with hole | APEAAGGPSVFLFPPKPKDTLMISRTPEVTCVVVDVSHEDPEVKFNWY |
| and LALA mutations | VDGVEVHNAKTKPREEQYNSTYRVVSVLTVLHQDWLNGKEYKCKV |
| | SNKALPAPIEKTISKAKGQPREPQVYTLPPSRDELTKNQVSLSCAVKGF |
| | YPSDIAVEWESNGQPENNYKTTPPVLDSDGSFFLVSKLTVDKSRWQQ |
| | GNVFSCSVMHEALHNHYTQKSLSLSPGK (SEQ ID NO: 2252) |
| Fc sequence with hole | APELLGGPSVFLFPPKPKDTLYITREPEVTCVVVDVSHEDPEVKFNWY |
| and YTE mutations | VDGVEVHNAKTKPREEQYNSTYRVVSVLTVLHQDWLNGKEYKCKV |
| | SNKALPAPIEKTISKAKGQPREPQVYTLPPSRDELTKNQVSLSCAVKGF |
| | YPSDIAVEWESNGQPENNYKTTPPVLDSDGSFFLVSKLTVDKSRWQQ |
| | GNVFSCSVMHEALHNHYTQKSLSLSPGK (SEQ ID NO: 2253) |
| Fc sequence with | APEAAGGPSVFLFPPKPKDTLYITREPEVTCVVVDVSHEDPEVKFNWY |
| hole, LALA, and YTE | VDGVEVHNAKTKPREEQYNSTYRVVSVLTVLHQDWLNGKEYKCKV |
| mutations | SNKALPAPIEKTISKAKGQPREPQVYTLPPSRDELTKNQVSLSCAVKGF |
| | YPSDIAVEWESNGQPENNYKTTPPVLDSDGSFFLVSKLTVDKSRWQQ |
| | GNVFSCSVMHEALHNHYTQKSLSLSPGK (SEQ ID NO: 2254) |
| Fc sequence with | APELLGGPSVFLFPPKPKDTLMISRTPEVTCVVVDVSHEDPEVKFNWY |
| knob mutation | VDGVEVHNAKTKPREEQYNSTYRVVSVLTVLHQDWLNGKEYKCKV |
| | SNKALPAPIEKTISKAKGQPREPQVYTLPPSRDELTKNQVSLWCLVKG |
| | FYPSDIAVEWESNGQPENNYKTTPPVLDSDGSFFLYSKLTVDKSRWQ |
| | QGNVFSCSVMHEALHNHYTQKSLSLSPGK(SEQ ID NO: 2255) |
| Fc sequence with | APEAAGGPSVFLFPPKPKDTLMISRTPEVTCVVVDVSHEDPEVKFNWY |
| knob and LALA | VDGVEVHNAKTKPREEQYNSTYRVVSVLTVLHQDWLNGKEYKCKV |
| mutations | SNKALPAPIEKTISKAKGQPREPQVYTLPPSRDELTKNQVSLWCLVKG |
| | FYPSDIAVEWESNGQPENNYKTTPPVLDSDGSFFLYSKLTVDKSRWQ |
| | QGNVFSCSVMHEALHNHYTQKSLSLSPGK (SEQ ID NO: 2256) |
| Fc sequence with | APELLGGPSVFLFPPKPKDTLYITREPEVTCVVVDVSHEDPEVKFNWY |
| knob and YTE | VDGVEVHNAKTKPREEQYNSTYRVVSVLTVLHQDWLNGKEYKCKV |
| mutations | SNKALPAPIEKTISKAKGQPREPQVYTLPPSRDELTKNQVSLWCLVKG |
| | FYPSDIAVEWESNGQPENNYKTTPPVLDSDGSFFLYSKLTVDKSRWQ |
| | QGNVFSCSVMHEALHNHYTQKSLSLSPGK (SEQ ID NO: 2257) |
| Fc sequence with | APEAAGGPSVFLFPPKPKDTLYITREPEVTCVVVDVSHEDPEVKFNWY |
| knob, LALA, and | VDGVEVHNAKTKPREEQYNSTYRVVSVLTVLHQDWLNGKEYKCKV |
| YTE mutations | SNKALPAPIEKTISKAKGQPREPQVYTLPPSRDELTKNQVSLWCLVKG |
| | FYPSDIAVEWESNGQPENNYKTTPPVLDSDGSFFLYSKLTVDKSRWQ |
| | QGNVFSCSVMHEALHNHYTQKSLSLSPGK (SEQ ID NO: 2258) |
| Clone CH3C.35.21 | APELLGGPSVFLFPPKPKDTLMISRTPEVTCVVVDVSHEDPEVKFNWY |
| with knob mutation | VDGVEVHNAKTKPREEQYNSTYRVVSVLTVLHQDWLNGKEYKCKV |
| | SNKALPAPIEKTISKAKGQPREPQVYTLPPSRDELTKNQVSLWCLVKG |
| | FYPSDIAVWWESYGTEWSSYKTTPPVLDSDGSFFLYSKLTVTKEEWQ |
| | QGFVFSCSVMHEALHNHYTQKSLSLSPGK (SEQ ID NO: 2259) |
| Clone CH3C.35.21 | APEAAGGPSVFLFPPKPKDTLMISRTPEVTCVVVDVSHEDPEVKFNWY |
| with knob and LALA | VDGVEVHNAKTKPREEQYNSTYRVVSVLTVLHQDWLNGKEYKCKV |
| mutations | SNKALPAPIEKTISKAKGQPREPQVYTLPPSRDELTKNQVSLWCLVKG |
| | FYPSDIAVWWESYGTEWSSYKTTPPVLDSDGSFFLYSKLTVTKEEWQ |
| | QGFVFSCSVMHEALHNHYTQKSLSLSPGK (SEQ ID NO: 2260) |
| | APELLGGPSVFLFPPKPKDTLYITREPEVTCVVVDVSHEDPEVKFNWY |
| Clone CH3C.35.21 | VDGVEVHNAKTKPREEQYNSTYRVVSVLTVLHQDWLNGKEYKCKV |
| with knob and YTE | SNKALPAPIEKTISKAKGQPREPQVYTLPPSRDELTKNQVSLWCLVKG |
| mutations | FYPSDIAVWWESYGTEWSSYKTTPPVLDSDGSFFLYSKLTVTKEEWQ |
| | QGFVFSCSVMHEALHNHYTQKSLSLSPGK (SEQ ID NO: 2261) |
| Clone CH3C.35.21 | APEAAGGPSVFLFPPKPKDTLYITREPEVTCVVVDVSHEDPEVKFNWY |
| with knob, LALA, | VDGVEVHNAKTKPREEQYNSTYRVVSVLTVLHQDWLNGKEYKCKV |
| and YTE mutations | SNKALPAPIEKTISKAKGQPREPQVYTLPPSRDELTKNQVSLWCLVKG |
| | FYPSDIAVWWESYGTEWSSYKTTPPVLDSDGSFFLYSKLTVTKEEWQ |
| | QGFVFSCSVMHEALHNHYTQKSLSLSPGK (SEQ ID NO: 2262) |
| Clone CH3C.35.21 | APELLGGPSVFLFPPKPKDTLMISRTPEVTCVVVDVSHEDPEVKFNWY |
| with hole mutations | VDGVEVHNAKTKPREEQYNSTYRVVSVLTVLHQDWLNGKEYKCKV |
| | SNKALPAPIEKTISKAKGQPREPQVYTLPPSRDELTKNQVSLSCAVKGF |
| | YPSDIAVWWESYGTEWSSYKTTPPVLDSDGSFFLVSKLTVTKEEWQQ |
| | GFVFSCSVMHEALHNHYTQKSLSLSPGK (SEQ ID NO: 2263) |
| Clone CH3C.35.21 | APEAAGGPSVFLFPPKPKDTLMISRTPEVTCVVVDVSHEDPEVKFNWY |
| with hole and LALA | VDGVEVHNAKTKPREEQYNSTYRVVSVLTVLHQDWLNGKEYKCKV |
| mutations | SNKALPAPIEKTISKAKGQPREPQVYTLPPSRDELTKNQVSLSCAVKGF |
| | YPSDIAVWWESYGTEWSSYKTTPPVLDSDGSFFLVSKLTVTKEEWQQ |
| | GFVFSCSVMHEALHNHYTQKSLSLSPGK (SEQ ID NO: 2264) |
| Clone CH3C.35.21 | APELLGGPSVFLFPPKPKDTLYITREPEVTCVVVDVSHEDPEVKFNWY |
| with hole and YTE | VDGVEVHNAKTKPREEQYNSTYRVVSVLTVLHQDWLNGKEYKCKV |
| mutations | SNKALPAPIEKTISKAKGQPREPQVYTLPPSRDELTKNQVSLSCAVKGF |
| | YPSDIAVWWESYGTEWSSYKTTPPVLDSDGSFFLVSKLTVTKEEWQQ |
| | GFVFSCSVMHEALHNHYTQKSLSLSPGK (SEQ ID NO: 2265) |
| Clone CH3C.35.21 | APEAAGGPSVFLFPPKPKDTLYITREPEVTCVVVDVSHEDPEVKFNWY |
| with hole, LALA, and | VDGVEVHNAKTKPREEQYNSTYRVVSVLTVLHQDWLNGKEYKCKV |
| YTE mutations | SNKALPAPIEKTISKAKGQPREPQVYTLPPSRDELTKNQVSLSCAVKGF |
| | YPSDIAVWWESYGTEWSSYKTTPPVLDSDGSFFLVSKLTVTKEEWQQ |
| | GFVFSCSVMHEALHNHYTQKSLSLSPGK (SEQ ID NO: 2266) |
| Clone CH3C.35.20.1 | APELLGGPSVFLFPPKPKDTLMISRTPEVTCVVVDVSHEDPEVKFNWY |
| with knob mutation | VDGVEVHNAKTKPREEQYNSTYRVVSVLTVLHQDWLNGKEYKCKV |
| | SNKALPAPIEKTISKAKGQPREPQVYTLPPSRDELTKNQVSLWCLVKG |
| | FYPSDIAVEWESFGTEWSSYKTTPPVLDSDGSFFLYSKLTVTKEEWQQ |
| | GFVFSCSVMHEALHNHYTQKSLSLSPGK (SEQ ID NO: 2267) |
| Clone CH3C.35.20.1 | APEAAGGPSVFLFPPKPKDTLMISRTPEVTCVVVDVSHEDPEVKFNWY |
| with knob and LALA | VDGVEVHNAKTKPREEQYNSTYRVVSVLTVLHQDWLNGKEYKCKV |
| mutations | SNKALPAPIEKTISKAKGQPREPQVYTLPPSRDELTKNQVSLWCLVKG |
| | FYPSDIAVEWESFGTEWSSYKTTPPVLDSDGSFFLYSKLTVTKEEWQQ |
| | GFVFSCSVMHEALHNHYTQKSLSLSPGK (SEQ ID NO: 2268) |
| Clone CH3C.35.20.1 | APEAAGGPSVFLFPPKPKDTLMISRTPEVTCVVVDVSHEDPEVKFNWY |
| with knob and | VDGVEVHNAKTKPREEQYNSTYRVVSVLTVLHQDWLNGKEYKCKV |
| LALAPG mutations | SNKALGAPIEKTISKAKGQPREPQVYTLPPSRDELTKNQVSLWCLVKG |
| | FYPSDIAVEWESFGTEWSSYKTTPPVLDSDGSFFLYSKLTVTKEEWQQ |
| | GFVFSCSVMHEALHNHYTQKSLSLSPGK (SEQ ID NO: 2269) |
| Clone CH3C.35.20.1 | APELLGGPSVFLFPPKPKDTLYITREPEVTCVVVDVSHEDPEVKFNWY |
| with knob and YTE | VDGVEVHNAKTKPREEQYNSTYRVVSVLTVLHQDWLNGKEYKCKV |
| mutations | SNKALPAPIEKTISKAKGQPREPQVYTLPPSRDELTKNQVSLWCLVKG |
| | FYPSDIAVEWESFGTEWSSYKTTPPVLDSDGSFFLYSKLTVTKEEWQQ |
| | GFVFSCSVMHEALHNHYTQKSLSLSPGK (SEQ ID NO: 2270) |
| Clone CH3C.35.20.1 | APEAAGGPSVFLFPPKPKDTLYITREPEVTCVVVDVSHEDPEVKFNWY |
| with knob, LALA, | VDGVEVHNAKTKPREEQYNSTYRVVSVLTVLHQDWLNGKEYKCKV |
| and YTE mutations | SNKALPAPIEKTISKAKGQPREPQVYTLPPSRDELTKNQVSLWCLVKG |
| | FYPSDIAVEWESFGTEWSSYKTTPPVLDSDGSFFLYSKLTVTKEEWQQ |
| | GFVFSCSVMHEALHNHYTQKSLSLSPGK (SEQ ID NO: 2271) |
| Clone CH3C.35.20.1 | APEAAGGPSVFLFPPKPKDTLYITREPEVTCVVVDVSHEDPEVKFNWY |
| with knob, LALAPG, | VDGVEVHNAKTKPREEQYNSTYRVVSVLTVLHQDWLNGKEYKCKV |
| and YTE mutations | SNKALGAPIEKTISKAKGQPREPQVYTLPPSRDELTKNQVSLWCLVKG |
| | FYPSDIAVEWESFGTEWSSYKTTPPVLDSDGSFFLYSKLTVTKEEWQQ |
| | GFVFSCSVMHEALHNHYTQKSLSLSPGK (SEQ ID NO: 2272) |
| Clone CH3C.35.20.1 | APELLGGPSVFLFPPKPKDTLMISRTPEVTCVVVDVSHEDPEVKFNWY |
| hole mutations | VDGVEVHNAKTKPREEQYNSTYRVVSVLTVLHQDWLNGKEYKCKV |
| | SNKALPAPIEKTISKAKGQPREPQVYTLPPSRDELTKNQVSLSCAVKGF |
| | YPSDIAVEWESFGTEWSSYKTTPPVLDSDGSFFLVSKLTVTKEEWQQG |
| | FVFSCSVMHEALHNHYTQKSLSLSPGK (SEQ ID NO: 2273) |
| CloneCH3C.35.20.1 | APEAAGGPSVFLFPPKPKDTLMISRTPEVTCVVVDVSHEDPEVKFNWY |
| with hole and LALA | VDGVEVHNAKTKPREEQYNSTYRVVSVLTVLHQDWLNGKEYKCKV |
| mutations | SNKALPAPIEKTISKAKGQPREPQVYTLPPSRDELTKNQVSLSCAVKGF |
| | YPSDIAVEWESFGTEWSSYKTTPPVLDSDGSFFLVSKLTVTKEEWQQG |
| | FVFSCSVMHEALHNHYTQKSLSLSPGK (SEQ ID NO: 2274) |
| Clone CH3C.35.20.1 | APEAAGGPSVFLFPPKPKDTLMISRTPEVTCVVVDVSHEDPEVKFNWY |
| with hole and | VDGVEVHNAKTKPREEQYNSTYRVVSVLTVLHQDWLNGKEYKCKV |
| LALAPG mutations | SNKALGAPIEKTISKAKGQPREPQVYTLPPSRDELTKNQVSLSCAVKG |
| | FYPSDIAVEWESFGTEWSSYKTTPPVLDSDGSFFLVSKLTVTKEEWQQ |
| | GFVFSCSVMHEALHNHYTQKSLSLSPGK (SEQ ID NO: 2275) |
| Clone CH3C.35.20.1 | APELLGGPSVFLFPPKPKDTLYITREPEVTCVVVDVSHEDPEVKFNWY |
| with hole and YTE | VDGVEVHNAKTKPREEQYNSTYRVVSVLTVLHQDWLNGKEYKCKV |
| mutations | SNKALPAPIEKTISKAKGQPREPQVYTLPPSRDELTKNQVSLSCAVKGF |
| | YPSDIAVEWESFGTEWSSYKTTPPVLDSDGSFFLVSKLTVTKEEWQQG |
| | FVFSCSVMHEALHNHYTQKSLSLSPGK (SEQ ID NO: 2276) |
| Clone CH3C.35.20.1 | APEAAGGPSVFLFPPKPKDTLYITREPEVTCVVVDVSHEDPEVKFNWY |
| with hole, LALA, and | VDGVEVHNAKTKPREEQYNSTYRVVSVLTVLHQDWLNGKEYKCKV |
| YTE mutations | SNKALPAPIEKTISKAKGQPREPQVYTLPPSRDELTKNQVSLSCAVKGF |
| | YPSDIAVEWESFGTEWSSYKTTPPVLDSDGSFFLVSKLTVTKEEWQQG |
| | FVFSCSVMHEALHNHYTQKSLSLSPGK (SEQ ID NO: 2277) |
| Clone CH3C.35.20.1 | APEAAGGPSVFLFPPKPKDTLYITREPEVTCVVVDVSHEDPEVKFNWY |
| with hole, LALAPG, | VDGVEVHNAKTKPREEQYNSTYRVVSVLTVLHQDWLNGKEYKCKV |
| and YTE mutations | SNKALGAPIEKTISKAKGQPREPQVYTLPPSRDELTKNQVSLSCAVKG |
| | FYPSDIAVEWESFGTEWSSYKTTPPVLDSDGSFFLVSKLTVTKEEWQQ |
| | GFVFSCSVMHEALHNHYTQKSLSLSPGK (SEQ ID NO: 2278) |
| Clone CH3C.35.23.2 | APELLGGPSVFLFPPKPKDTLMISRTPEVTCVVVDVSHEDPEVKFNWY |
| with knob mutation | VDGVEVHNAKTKPREEQYNSTYRVVSVLTVLHQDWLNGKEYKCKV |
| | SNKALPAPIEKTISKAKGQPREPQVYTLPPSRDELTKNQVSLWCLVKG |
| | FYPSDIAVEWESYGTEWANYKTTPPVLDSDGSFFLYSKLTVTKEEWQ |
| | QGFVFSCSVMHEALHNHYTQKSLSLSPGK (SEQ ID NO: 2279) |
| Clone CH3C.35.23.2 | APEAAGGPSVFLFPPKPKDTLMISRTPEVTCVVVDVSHEDPEVKFNWY |
| with knob and LALA | VDGVEVHNAKTKPREEQYNSTYRVVSVLTVLHQDWLNGKEYKCKV |
| mutations | SNKALPAPIEKTISKAKGQPREPQVYTLPPSRDELTKNQVSLWCLVKG |
| | FYPSDIAVEWESYGTEWANYKTTPPVLDSDGSFFLYSKLTVTKEEWQ |
| | QGFVFSCSVMHEALHNHYTQKSLSLSPGK (SEQ ID NO: 2280) |
| Clone CH3C.35.23.2 | APEAAGGPSVFLFPPKPKDTLMISRTPEVTCVVVDVSHEDPEVKFNWY |
| with knob and | VDGVEVHNAKTKPREEQYNSTYRVVSVLTVLHQDWLNGKEYKCKV |
| LALAPG mutations | SNKALGAPIEKTISKAKGQPREPQVYTLPPSRDELTKNQVSLWCLVKG |
| | FYPSDIAVEWESYGTEWANYKTTPPVLDSDGSFFLYSKLTVTKEEWQ |
| | QGFVFSCSVMHEALHNHYTQKSLSLSPGK (SEQ ID NO: 2281) |
| Clone CH3C.35.23.2 | APELLGGPSVFLFPPKPKDTLYITREPEVTCVVVDVSHEDPEVKFNWY |
| with knob and YTE | VDGVEVHNAKTKPREEQYNSTYRVVSVLTVLHQDWLNGKEYKCKV |
| mutations | SNKALPAPIEKTISKAKGQPREPQVYTLPPSRDELTKNQVSLWCLVKG |
| | FYPSDIAVEWESYGTEWANYKTTPPVLDSDGSFFLYSKLTVTKEEWQ |
| | QGFVFSCSVMHEALHNHYTQKSLSLSPGK (SEQ ID NO: 2282) |
| Clone CH3C.35.23.2 | APEAAGGPSVFLFPPKPKDTLYITREPEVTCVVVDVSHEDPEVKFNWY |
| with knob, LALA, | VDGVEVHNAKTKPREEQYNSTYRVVSVLTVLHQDWLNGKEYKCKV |
| and YTE mutations | SNKALPAPIEKTISKAKGQPREPQVYTLPPSRDELTKNQVSLWCLVKG |
| | FYPSDIAVEWESYGTEWANYKTTPPVLDSDGSFFLYSKLTVTKEEWQ |
| | QGFVFSCSVMHEALHNHYTQKSLSLSPGK (SEQ ID NO: 2283) |
| Clone CH3C.35.23.2 | APEAAGGPSVFLFPPKPKDTLYITREPEVTCVVVDVSHEDPEVKFNWY |
| with knob, LALAPG, | VDGVEVHNAKTKPREEQYNSTYRVVSVLTVLHQDWLNGKEYKCKV |
| and YTE mutations | SNKALGAPIEKTISKAKGQPREPQVYTLPPSRDELTKNQVSLWCLVKG |
| | FYPSDIAVEWESYGTEWANYKTTPPVLDSDGSFFLYSKLTVTKEEWQ |
| | QGFVFSCSVMHEALHNHYTQKSLSLSPGK (SEQ ID NO: 2284) |
| Clone CH3C.35.23.2 | APELLGGPSVFLFPPKPKDTLMISRTPEVTCVVVDVSHEDPEVKFNWY |
| with hole mutations | VDGVEVHNAKTKPREEQYNSTYRVVSVLTVLHQDWLNGKEYKCKV |
| | SNKALPAPIEKTISKAKGQPREPQVYTLPPSRDELTKNQVSLSCAVKGF |
| | YPSDIAVEWESYGTEWANYKTTPPVLDSDGSFFLVSKLTVTKEEWQQ |
| | GFVFSCSVMHEALHNHYTQKSLSLSPGK (SEQ ID NO: 2285) |
| Clone CH3C.35.23.2 | APEAAGGPSVFLFPPKPKDTLMISRTPEVTCVVVDVSHEDPEVKFNWY |
| with hole and LALA | VDGVEVHNAKTKPREEQYNSTYRVVSVLTVLHQDWLNGKEYKCKV |
| mutations | SNKALPAPIEKTISKAKGQPREPQVYTLPPSRDELTKNQVSLSCAVKGF |
| | YPSDIAVEWESYGTEWANYKTTPPVLDSDGSFFLVSKLTVTKEEWQQ |
| | GFVFSCSVMHEALHNHYTQKSLSLSPGK (SEQ ID NO: 2286) |
| Clone CH3C.35.23.2 | APEAAGGPSVFLFPPKPKDTLMISRTPEVTCVVVDVSHEDPEVKFNWY |
| with hole and | VDGVEVHNAKTKPREEQYNSTYRVVSVLTVLHQDWLNGKEYKCKV |
| LALAPG mutations | SNKALGAPIEKTISKAKGQPREPQVYTLPPSRDELTKNQVSLSCAVKG |
| | FYPSDIAVEWESYGTEWANYKTTPPVLDSDGSFFLVSKLTVTKEEWQ |
| | QGFVFSCSVMHEALHNHYTQKSLSLSPGK (SEQ ID NO: 2287) |
| Clone CH3C.35.23.2 | APELLGGPSVFLFPPKPKDTLYITREPEVTCVVVDVSHEDPEVKFNWY |
| with hole and YTE | VDGVEVHNAKTKPREEQYNSTYRVVSVLTVLHQDWLNGKEYKCKV |
| mutations | SNKALPAPIEKTISKAKGQPREPQVYTLPPSRDELTKNQVSLSCAVKGF |
| | YPSDIAVEWESYGTEWANYKTTPPVLDSDGSFFLVSKLTVTKEEWQQ |
| | GFVFSCSVMHEALHNHYTQKSLSLSPGK (SEQ ID NO: 2288) |
| Clone CH3C.35.23.2 | APEAAGGPSVFLFPPKPKDTLYITREPEVTCVVVDVSHEDPEVKFNWY |
| with hole, LALA, and | VDGVEVHNAKTKPREEQYNSTYRVVSVLTVLHQDWLNGKEYKCKV |
| YTE mutations | SNKALPAPIEKTISKAKGQPREPQVYTLPPSRDELTKNQVSLSCAVKGF |
| | YPSDIAVEWESYGTEWANYKTTPPVLDSDGSFFLVSKLTVTKEEWQQ |
| | GFVFSCSVMHEALHNHYTQKSLSLSPGK (SEQ ID NO: 2289) |
| Clone CH3C.35.23.2 | APEAAGGPSVFLFPPKPKDTLYITREPEVTCVVVDVSHEDPEVKFNWY |
| with hole, LALAPG, | VDGVEVHNAKTKPREEQYNSTYRVVSVLTVLHQDWLNGKEYKCKV |
| and YTE mutations | SNKALGAPIEKTISKAKGQPREPQVYTLPPSRDELTKNQVSLSCAVKG |
| | FYPSDIAVEWESYGTEWANYKTTPPVLDSDGSFFLVSKLTVTKEEWQ |
| | QGFVFSCSVMHEALHNHYTQKSLSLSPGK (SEQ ID NO: 2290) |
| Clone CH3C.35.23.3 | APELLGGPSVFLFPPKPKDTLMISRTPEVTCVVVDVSHEDPEVKFNWY |
| with knob mutation | VDGVEVHNAKTKPREEQYNSTYRVVSVLTVLHQDWLNGKEYKCKV |
| | SNKALPAPIEKTISKAKGQPREPQVYTLPPSRDELTKNQVSLWCLVKG |
| | FYPSDIAVEWESYGTEWVNYKTTPPVLDSDGSFFLYSKLTVTKEEWQ |
| | QGFVFSCSVMHEALHNHYTQKSLSLSPGK (SEQ ID NO: 2291) |
| Clone CH3C.35.23.3 | APEAAGGPSVFLFPPKPKDTLMISRTPEVTCVVVDVSHEDPEVKFNWY |
| with knob and LALA | VDGVEVHNAKTKPREEQYNSTYRVVSVLTVLHQDWLNGKEYKCKV |
| mutations | SNKALPAPIEKTISKAKGQPREPQVYTLPPSRDELTKNQVSLWCLVKG |
| | FYPSDIAVEWESYGTEWVNYKTTPPVLDSDGSFFLYSKLTVTKEEWQ |
| | QGFVFSCSVMHEALHNHYTQKSLSLSPGK (SEQ ID NO: 2292) |
| Clone CH3C.35.23.3 | APEAAGGPSVFLFPPKPKDTLMISRTPEVTCVVVDVSHEDPEVKFNWY |
| with knob and | VDGVEVHNAKTKPREEQYNSTYRVVSVLTVLHQDWLNGKEYKCKV |
| LALAPG mutations | SNKALGAPIEKTISKAKGQPREPQVYTLPPSRDELTKNQVSLWCLVKG |
| | FYPSDIAVEWESYGTEWVNYKTTPPVLDSDGSFFLYSKLTVTKEEWQ |
| | QGFVFSCSVMHEALHNHYTQKSLSLSPGK (SEQ ID NO: 2293) |
| Clone CH3C.35.23.3 | APELLGGPSVFLFPPKPKDTLYITREPEVTCVVVDVSHEDPEVKFNWY |
| with knob and YTE | VDGVEVHNAKTKPREEQYNSTYRVVSVLTVLHQDWLNGKEYKCKV |
| mutations | SNKALPAPIEKTISKAKGQPREPQVYTLPPSRDELTKNQVSLWCLVKG |
| | FYPSDIAVEWESYGTEWVNYKTTPPVLDSDGSFFLYSKLTVTKEEWQ |
| | QGFVFSCSVMHEALHNHYTQKSLSLSPGK (SEQ ID NO: 2294) |
| Clone CH3C.35.23.3 | APEAAGGPSVFLFPPKPKDTLYITREPEVTCVVVDVSHEDPEVKFNWY |
| with knob, LALA, | VDGVEVHNAKTKPREEQYNSTYRVVSVLTVLHQDWLNGKEYKCKV |
| and YTE mutations | SNKALPAPIEKTISKAKGQPREPQVYTLPPSRDELTKNQVSLWCLVKG |
| | FYPSDIAVEWESYGTEWVNYKTTPPVLDSDGSFFLYSKLTVTKEEWQ |
| | QGFVFSCSVMHEALHNHYTQKSLSLSPGK (SEQ ID NO: 2295) |
| Clone CH3C.35.23.3 | APEAAGGPSVFLFPPKPKDTLYITREPEVTCVVVDVSHEDPEVKFNWY |
| with knob, LALAPG, | VDGVEVHNAKTKPREEQYNSTYRVVSVLTVLHQDWLNGKEYKCKV |
| and YTE mutations | SNKALGAPIEKTISKAKGQPREPQVYTLPPSRDELTKNQVSLWCLVKG |
| | FYPSDIAVEWESYGTEWVNYKTTPPVLDSDGSFFLYSKLTVTKEEWQ |
| | QGFVFSCSVMHEALHNHYTQKSLSLSPGK (SEQ ID NO: 2296) |
| Clone CH3C.35.23.3 | APELLGGPSVFLFPPKPKDTLMISRTPEVTCVVVDVSHEDPEVKFNWY |
| with hole mutations | VDGVEVHNAKTKPREEQYNSTYRVVSVLTVLHQDWLNGKEYKCKV |
| | SNKALPAPIEKTISKAKGQPREPQVYTLPPSRDELTKNQVSLSCAVKGF |
| | YPSDIAVEWESYGTEWVNYKTTPPVLDSDGSFFLVSKLTVTKEEWQQ |
| | GFVFSCSVMHEALHNHYTQKSLSLSPGK (SEQ ID NO: 2297) |
| Clone CH3C.35.23.3 | APEAAGGPSVFLFPPKPKDTLMISRTPEVTCVVVDVSHEDPEVKFNWY |
| with hole and LALA | VDGVEVHNAKTKPREEQYNSTYRVVSVLTVLHQDWLNGKEYKCKV |
| mutations | SNKALPAPIEKTISKAKGQPREPQVYTLPPSRDELTKNQVSLSCAVKGF |
| | YPSDIAVEWESYGTEWVNYKTTPPVLDSDGSFFLVSKLTVTKEEWQQ |
| | GFVFSCSVMHEALHNHYTQKSLSLSPGK (SEQ ID NO: 2298) |
| Clone CH3C.35.23.3 | APEAAGGPSVFLFPPKPKDTLMISRTPEVTCVVVDVSHEDPEVKFNWY |
| with hole and | VDGVEVHNAKTKPREEQYNSTYRVVSVLTVLHQDWLNGKEYKCKV |
| LALAPG mutations | SNKALGAPIEKTISKAKGQPREPQVYTLPPSRDELTKNQVSLSCAVKG |
| | FYPSDIAVEWESYGTEWVNYKTTPPVLDSDGSFFLVSKLTVTKEEWQ |
| | QGFVFSCSVMHEALHNHYTQKSLSLSPGK (SEQ ID NO: 2299) |
| Clone CH3C.35.23.3 | APELLGGPSVFLFPPKPKDTLYITREPEVTCVVVDVSHEDPEVKFNWY |
| with hole and YTE | VDGVEVHNAKTKPREEQYNSTYRVVSVLTVLHQDWLNGKEYKCKV |
| mutations | SNKALPAPIEKTISKAKGQPREPQVYTLPPSRDELTKNQVSLSCAVKGF |
| | YPSDIAVEWESYGTEWVNYKTTPPVLDSDGSFFLVSKLTVTKEEWQQ |
| | GFVFSCSVMHEALHNHYTQKSLSLSPGK (SEQ ID NO: 2300) |
| Clone CH3C.35.23.3 | APEAAGGPSVFLFPPKPKDTLYITREPEVTCVVVDVSHEDPEVKFNWY |
| with hole. LALA, and | VDGVEVHNAKTKPREEQYNSTYRVVSVLTVLHQDWLNGKEYKCKV |
| YTE mutations | SNKALPAPIEKTISKAKGQPREPQVYTLPPSRDELTKNQVSLSCAVKGF |
| | YPSDIAVEWESYGTEWVNYKTTPPVLDSDGSFFLVSKLTVTKEEWQQ |
| | GFVFSCSVMHEALHNHYTQKSLSLSPGK (SEQ ID NO: 2301) |
| Clone CH3C.35.23.3 | APEAAGGPSVFLFPPKPKDTLYITREPEVTCVVVDVSHEDPEVKFNWY |
| with hole, LALAPG, | VDGVEVHNAKTKPREEQYNSTYRVVSVLTVLHQDWLNGKEYKCKV |
| and YTE mutations | SNKALGAPIEKTISKAKGQPREPQVYTLPPSRDELTKNQVSLSCAVKG |
| | FYPSDIAVEWESYGTEWVNYKTTPPVLDSDGSFFLVSKLTVTKEEWQ |
| | QGFVFSCSVMHEALHNHYTQKSLSLSPGK (SEQ ID NO: 2302) |
| Clone CH3C.35.23.4 | APELLGGPSVFLFPPKPKDTLMISRTPEVTCVVVDVSHEDPEVKFNWY |
| with knob mutation | VDGVEVHNAKTKPREEQYNSTYRVVSVLTVLHQDWLNGKEYKCKV |
| | SNKALPAPIEKTISKAKGQPREPQVYTLPPSRDELTKNQVSLWCLVKG |
| | FYPSDIAVEWESYGTEWSNYKTTPPVLDSDGSFFLYSKLTVSKEEWQQ |
| | GFVFSCSVMHEALHNHYTQKSLSLSPGK (SEQ ID NO: 2303) |
| Clone CH3C.35.23.4 | APEAAGGPSVFLFPPKPKDTLMISRTPEVTCVVVDVSHEDPEVKFNWY |
| with knob and LALA | VDGVEVHNAKTKPREEQYNSTYRVVSVLTVLHQDWLNGKEYKCKV |
| mutations | SNKALPAPIEKTISKAKGQPREPQVYTLPPSRDELTKNQVSLWCLVKG |
| | FYPSDIAVEWESYGTEWSNYKTTPPVLDSDGSFFLYSKLTVSKEEWQQ |
| | GFVFSCSVMHEALHNHYTQKSLSLSPGK (SEQ ID NO: 2304) |
| Clone CH3C.35.23.4 | APEAAGGPSVFLFPPKPKDTLMISRTPEVTCVVVDVSHEDPEVKFNWY |
| with knob and | VDGVEVHNAKTKPREEQYNSTYRVVSVLTVLHQDWLNGKEYKCKV |
| LALAPG mutations | SNKALGAPIEKTISKAKGQPREPQVYTLPPSRDELTKNQVSLWCLVKG |
| | FYPSDIAVEWESYGTEWSNYKTTPPVLDSDGSFFLYSKLTVSKEEWQQ |
| | GFVFSCSVMHEALHNHYTQKSLSLSPGK (SEQ ID NO: 2305) |
| Clone CH3C.35.23.4 | APELLGGPSVFLFPPKPKDTLYITREPEVTCVVVDVSHEDPEVKFNWY |
| with knob and YTE | VDGVEVHNAKTKPREEQYNSTYRVVSVLTVLHQDWLNGKEYKCKV |
| mutations | SNKALPAPIEKTISKAKGQPREPQVYTLPPSRDELTKNQVSLWCLVKG |
| | FYPSDIAVEWESYGTEWSNYKTTPPVLDSDGSFFLYSKLTVSKEEWQQ |
| | GFVFSCSVMHEALHNHYTQKSLSLSPGK (SEQ ID NO: 2306) |
| Clone CH3C.35.23.4 | APEAAGGPSVFLFPPKPKDTLYITREPEVTCVVVDVSHEDPEVKFNWY |
| with knob, LALA, | VDGVEVHNAKTKPREEQYNSTYRVVSVLTVLHQDWLNGKEYKCKV |
| and YTE mutations | SNKALPAPIEKTISKAKGQPREPQVYTLPPSRDELTKNQVSLWCLVKG |
| | FYPSDIAVEWESYGTEWSNYKTTPPVLDSDGSFFLYSKLTVSKEEWQQ |
| | GFVFSCSVMHEALHNHYTQKSLSLSPGK (SEQ ID NO: 2307) |
| Clone CH3C.35.23.4 | APEAAGGPSVFLFPPKPKDTLYITREPEVTCVVVDVSHEDPEVKFNWY |
| with knob, LALAPG, | VDGVEVHNAKTKPREEQYNSTYRVVSVLTVLHQDWLNGKEYKCKV |
| and YTE mutations | SNKALGAPIEKTISKAKGQPREPQVYTLPPSRDELTKNQVSLWCLVKG |
| | FYPSDIAVEWESYGTEWSNYKTTPPVLDSDGSFFLYSKLTVSKEEWQQ |
| | GFVFSCSVMHEALHNHYTQKSLSLSPGK (SEQ ID NO: 2308) |
| Clone CH3C.35.23.4 | APELLGGPSVFLFPPKPKDTLMISRTPEVTCVVVDVSHEDPEVKFNWY |
| with hole mutations | VDGVEVHNAKTKPREEQYNSTYRVVSVLTVLHQDWLNGKEYKCKV |
| | SNKALPAPIEKTISKAKGQPREPQVYTLPPSRDELTKNQVSLSCAVKGF |
| | YPSDIAVEWESYGTEWSNYKTTPPVLDSDGSFFLVSKLTVSKEEWQQ |
| | GFVFSCSVMHEALHNHYTQKSLSLSPGK (SEQ ID NO: 2309) |
| Clone CH3C.35.23.4 | APEAAGGPSVFLFPPKPKDTLMISRTPEVTCVVVDVSHEDPEVKFNWY |
| with hole and LALA | VDGVEVHNAKTKPREEQYNSTYRVVSVLTVLHQDWLNGKEYKCKV |
| mutations | SNKALPAPIEKTISKAKGQPREPQVYTLPPSRDELTKNQVSLSCAVKGF |
| | YPSDIAVEWESYGTEWSNYKTTPPVLDSDGSFFLVSKLTVSKEEWQQ |
| | GFVFSCSVMHEALHNHYTQKSLSLSPGK (SEQ ID NO: 2310) |
| Clone CH3C.35.23.4 | APEAAGGPSVFLFPPKPKDTLMISRTPEVTCVVVDVSHEDPEVKFNWY |
| with hole and | VDGVEVHNAKTKPREEQYNSTYRVVSVLTVLHQDWLNGKEYKCKV |
| LALAPG mutations | SNKALGAPIEKTISKAKGQPREPQVYTLPPSRDELTKNQVSLSCAVKG |
| | FYPSDIAVEWESYGTEWSNYKTTPPVLDSDGSFFLVSKLTVSKEEWQQ |
| | GFVFSCSVMHEALHNHYTQKSLSLSPGK (SEQ ID NO: 2311) |
| Clone CH3C.35.23.4 | APELLGGPSVFLFPPKPKDTLYITREPEVTCVVVDVSHEDPEVKFNWY |
| with hole and YTE | VDGVEVHNAKTKPREEQYNSTYRVVSVLTVLHQDWLNGKEYKCKV |
| mutations | SNKALPAPIEKTISKAKGQPREPQVYTLPPSRDELTKNQVSLSCAVKGF |
| | YPSDIAVEWESYGTEWSNYKTTPPVLDSDGSFFLVSKLTVSKEEWQQ |
| | GFVFSCSVMHEALHNHYTQKSLSLSPGK (SEQ ID NO: 2312) |
| Clone CH3C.35.23.4 | APEAAGGPSVFLFPPKPKDTLYITREPEVTCVVVDVSHEDPEVKFNWY |
| with hole. LALA, and | VDGVEVHNAKTKPREEQYNSTYRVVSVLTVLHQDWLNGKEYKCKV |
| YTE mutations | SNKALPAPIEKTISKAKGQPREPQVYTLPPSRDELTKNQVSLSCAVKGF |
| | YPSDIAVEWESYGTEWSNYKTTPPVLDSDGSFFLVSKLTVSKEEWQQ |
| | GFVFSCSVMHEALHNHYTQKSLSLSPGK (SEQ ID NO: 2313) |
| Clone CH3C.35.23.4 | APEAAGGPSVFLFPPKPKDTLYITREPEVTCVVVDVSHEDPEVKFNWY |
| with hole, LALAPG, | VDGVEVHNAKTKPREEQYNSTYRVVSVLTVLHQDWLNGKEYKCKV |
| and YTE mutations | SNKALGAPIEKTISKAKGQPREPQVYTLPPSRDELTKNQVSLSCAVKG |
| | FYPSDIAVEWESYGTEWSNYKTTPPVLDSDGSFFLVSKLTVSKEEWQQ |
| | GFVFSCSVMHEALHNHYTQKSLSLSPGK (SEQ ID NO: 2314) |
| Clone CH3C.35.21.17.2 | APELLGGPSVFLFPPKPKDTLMISRTPEVTCVVVDVSHEDPEVKFNWY |
| with knob | VDGVEVHNAKTKPREEQYNSTYRVVSVLTVLHQDWLNGKEYKCKV |
| mutation | SNKALPAPIEKTISKAKGQPREPQVYTLPPSRDELTKNQVSLWCLVKG |
| | FYPSDIAVLWESYGTEWASYKTTPPVLDSDGSFFLYSKLTVTKEEWQ |
| | QGFVFSCSVMHEALHNHYTQKSLSLSPGK (SEQ ID NO: 2315) |
| Clone CH3C.35.21.17.2 | APEAAGGPSVFLFPPKPKDTLMISRTPEVTCVVVDVSHEDPEVKFNWY |
| with knob and | VDGVEVHNAKTKPREEQYNSTYRVVSVLTVLHQDWLNGKEYKCKV |
| LALA mutations | SNKALPAPIEKTISKAKGQPREPQVYTLPPSRDELTKNQVSLWCLVKG |
| | FYPSDIAVLWESYGTEWASYKTTPPVLDSDGSFFLYSKLTVTKEEWQ |
| | QGFVFSCSVMHEALHNHYTQKSLSLSPGK (SEQ ID NO: 2316) |
| Clone CH3C.35.21.17.2 | APEAAGGPSVFLFPPKPKDTLMISRTPEVTCVVVDVSHEDPEVKFNWY |
| with knob and | VDGVEVHNAKTKPREEQYNSTYRVVSVLTVLHQDWLNGKEYKCKV |
| LALAPG mutations | SNKALGAPIEKTISKAKGQPREPQVYTLPPSRDELTKNQVSLWCLVKG |
| | FYPSDIAVLWESYGTEWASYKTTPPVLDSDGSFFLYSKLTVTKEEWQ |
| | QGFVFSCSVMHEALHNHYTQKSLSLSPGK (SEQ ID NO: 2317) |
| Clone CH3C.35.21.17.2 | APELLGGPSVFLFPPKPKDTLYITREPEVTCVVVDVSHEDPEVKFNWY |
| with knob and | VDGVEVHNAKTKPREEQYNSTYRVVSVLTVLHQDWLNGKEYKCKV |
| YTE mutations | SNKALPAPIEKTISKAKGQPREPQVYTLPPSRDELTKNQVSLWCLVKG |
| | FYPSDIAVLWESYGTEWASYKTTPPVLDSDGSFFLYSKLTVTKEEWQ |
| | QGFVFSCSVMHEALHNHYTQKSLSLSPGK (SEQ ID NO: 2318) |
| Clone CH3C.35.21.17.2 | APEAAGGPSVFLFPPKPKDTLYITREPEVTCVVVDVSHEDPEVKFNWY |
| with knob, | VDGVEVHNAKTKPREEQYNSTYRVVSVLTVLHQDWLNGKEYKCKV |
| LALA, and YTE | SNKALPAPIEKTISKAKGQPREPQVYTLPPSRDELTKNQVSLWCLVKG |
| mutations | FYPSDIAVLWESYGTEWASYKTTPPVLDSDGSFFLYSKLTVTKEEWQ |
| | QGFVFSCSVMHEALHNHYTQKSLSLSPGK (SEQ ID NO: 2319) |
| Clone CH3C.35.21.17.2 | APEAAGGPSVFLFPPKPKDTLYITREPEVTCVVVDVSHEDPEVKFNWY |
| with knob, | VDGVEVHNAKTKPREEQYNSTYRVVSVLTVLHQDWLNGKEYKCKV |
| LALAPG, and YTE | SNKALGAPIEKTISKAKGQPREPQVYTLPPSRDELTKNQVSLWCLVKG |
| mutations | FYPSDIAVLWESYGTEWASYKTTPPVLDSDGSFFLYSKLTVTKEEWQ |
| | QGFVFSCSVMHEALHNHYTQKSLSLSPGK (SEQ ID NO: 2320) |
| Clone CH3C.35.21.17.2 | APELLGGPSVFLFPPKPKDTLMISRTPEVTCVVVDVSHEDPEVKFNWY |
| with hole | VDGVEVHNAKTKPREEQYNSTYRVVSVLTVLHQDWLNGKEYKCKV |
| mutations | SNKALPAPIEKTISKAKGQPREPQVYTLPPSRDELTKNQVSLSCAVKGF |
| | YPSDIAVLWESYGTEWASYKTTPPVLDSDGSFFLVSKLTVTKEEWQQ |
| | GFVFSCSVMHEALHNHYTQKSLSLSPGK (SEQ ID NO: 2321) |
| Clone CH3C.35.21.17.2 | APEAAGGPSVFLFPPKPKDTLMISRTPEVTCVVVDVSHEDPEVKFNWY |
| with hole and | VDGVEVHNAKTKPREEQYNSTYRVVSVLTVLHQDWLNGKEYKCKV |
| LALA mutations | SNKALPAPIEKTISKAKGQPREPQVYTLPPSRDELTKNQVSLSCAVKGF |
| | YPSDIAVLWESYGTEWASYKTTPPVLDSDGSFFLVSKLTVTKEEWQQ |
| | GFVFSCSVMHEALHNHYTQKSLSLSPGK (SEQ ID NO: 2322) |
| Clone CH3C.35.21.17.2 | APEAAGGPSVFLFPPKPKDTLMISRTPEVTCVVVDVSHEDPEVKFNWY |
| with hole and | VDGVEVHNAKTKPREEQYNSTYRVVSVLTVLHQDWLNGKEYKCKV |
| LALAPG mutations | SNKALGAPIEKTISKAKGQPREPQVYTLPPSRDELTKNQVSLSCAVKG |
| | FYPSDIAVLWESYGTEWASYKTTPPVLDSDGSFFLVSKLTVTKEEWQ |
| | QGFVFSCSVMHEALHNHYTQKSLSLSPGK (SEQ ID NO: 2323) |
| Clone CH3C.35.21.17.2 | APELLGGPSVFLFPPKPKDTLYITREPEVTCVVVDVSHEDPEVKFNWY |
| with hole and | VDGVEVHNAKTKPREEQYNSTYRVVSVLTVLHQDWLNGKEYKCKV |
| YTE mutations | SNKALPAPIEKTISKAKGQPREPQVYTLPPSRDELTKNQVSLSCAVKGF |
| | YPSDIAVLWESYGTEWASYKTTPPVLDSDGSFFLVSKLTVTKEEWQQ |
| | GFVFSCSVMHEALHNHYTQKSLSLSPGK (SEQ ID NO: 2324) |
| Clone CH3C.35.21.17.2 | APEAAGGPSVFLFPPKPKDTLYITREPEVTCVVVDVSHEDPEVKFNWY |
| with hole, | VDGVEVHNAKTKPREEQYNSTYRVVSVLTVLHQDWLNGKEYKCKV |
| LALA, and YTE | SNKALPAPIEKTISKAKGQPREPQVYTLPPSRDELTKNQVSLSCAVKGF |
| mutations | YPSDIAVLWESYGTEWASYKTTPPVLDSDGSFFLVSKLTVTKEEWQQ |
| | GFVFSCSVMHEALHNHYTQKSLSLSPGK (SEQ ID NO: 2325) |
| Clone CH3C.35.21.17.2 | APEAAGGPSVFLFPPKPKDTLYITREPEVTCVVVDVSHEDPEVKFNWY |
| with hole, | VDGVEVHNAKTKPREEQYNSTYRVVSVLTVLHQDWLNGKEYKCKV |
| LALAPG, and YTE | SNKALGAPIEKTISKAKGQPREPQVYTLPPSRDELTKNQVSLSCAVKG |
| mutations | FYPSDIAVLWESYGTEWASYKTTPPVLDSDGSFFLVSKLTVTKEEWQ |
| | QGFVFSCSVMHEALHNHYTQKSLSLSPGK (SEQ ID NO: 2326) |
| Clone CH3C.35.23 | APELLGGPSVFLFPPKPKDTLMISRTPEVTCVVVDVSHEDPEVKFNWY |
| with knob mutation | VDGVEVHNAKTKPREEQYNSTYRVVSVLTVLHQDWLNGKEYKCKV |
| | SNKALPAPIEKTISKAKGQPREPQVYTLPPSRDELTKNQVSLWCLVKG |
| | FYPSDIAVEWESYGTEWSNYKTTPPVLDSDGSFFLYSKLTVTKEEWQ |
| | QGFVFSCSVMHEALHNHYTQKSLSLSPGK (SEQ ID NO: 2327) |
| Clone CH3C.35.23 | APEAAGGPSVFLFPPKPKDTLMISRTPEVTCVVVDVSHEDPEVKFNWY |
| with knob and LALA | VDGVEVHNAKTKPREEQYNSTYRVVSVLTVLHQDWLNGKEYKCKV |
| mutations | SNKALPAPIEKTISKAKGQPREPQVYTLPPSRDELTKNQVSLWCLVKG |
| | FYPSDIAVEWESYGTEWSNYKTTPPVLDSDGSFFLYSKLTVTKEEWQ |
| | QGFVFSCSVMHEALHNHYTQKSLSLSPGK (SEQ ID NO: 2328) |
| Clone CH3C.35.23 | APEAAGGPSVFLFPPKPKDTLMISRTPEVTCVVVDVSHEDPEVKFNWY |
| with knob and | VDGVEVHNAKTKPREEQYNSTYRVVSVLTVLHQDWLNGKEYKCKV |
| LALAPG mutations | SNKALGAPIEKTISKAKGQPREPQVYTLPPSRDELTKNQVSLWCLVKG |
| | FYPSDIAVEWESYGTEWSNYKTTPPVLDSDGSFFLYSKLTVTKEEWQ |
| | QGFVFSCSVMHEALHNHYTQKSLSLSPGK (SEQ ID NO: 2329) |
| Clone CH3C.35.23 | APELLGGPSVFLFPPKPKDTLYITREPEVTCVVVDVSHEDPEVKFNWY |
| with knob and YTE | VDGVEVHNAKTKPREEQYNSTYRVVSVLTVLHQDWLNGKEYKCKV |
| mutations | SNKALPAPIEKTISKAKGQPREPQVYTLPPSRDELTKNQVSLWCLVKG |
| | FYPSDIAVEWESYGTEWSNYKTTPPVLDSDGSFFLYSKLTVTKEEWQ |
| | QGFVFSCSVMHEALHNHYTQKSLSLSPGK (SEQ ID NO: 2330) |
| Clone CH3C.35.23 | APEAAGGPSVFLFPPKPKDTLYITREPEVTCVVVDVSHEDPEVKFNWY |
| with knob, LALA, | VDGVEVHNAKTKPREEQYNSTYRVVSVLTVLHQDWLNGKEYKCKV |
| and YTE mutations | SNKALPAPIEKTISKAKGQPREPQVYTLPPSRDELTKNQVSLWCLVKG |
| | FYPSDIAVEWESYGTEWSNYKTTPPVLDSDGSFFLYSKLTVTKEEWQ |
| | QGFVFSCSVMHEALHNHYTQKSLSLSPGK (SEQ ID NO: 2331) |
| Clone CH3C.35.23 | APEAAGGPSVFLFPPKPKDTLYITREPEVTCVVVDVSHEDPEVKFNWY |
| with knob, LALAPG, | VDGVEVHNAKTKPREEQYNSTYRVVSVLTVLHQDWLNGKEYKCKV |
| and YTE mutations | SNKALGAPIEKTISKAKGQPREPQVYTLPPSRDELTKNQVSLWCLVKG |
| | FYPSDIAVEWESYGTEWSNYKTTPPVLDSDGSFFLYSKLTVTKEEWQ |
| | QGFVFSCSVMHEALHNHYTQKSLSLSPGK (SEQ ID NO: 2332) |
| Clone CH3C.35.23 | APELLGGPSVFLFPPKPKDTLMISRTPEVTCVVVDVSHEDPEVKFNWY |
| with hole mutations | VDGVEVHNAKTKPREEQYNSTYRVVSVLTVLHQDWLNGKEYKCKV |
| | SNKALPAPIEKTISKAKGQPREPQVYTLPPSRDELTKNQVSLSCAVKGF |
| | YPSDIAVEWESYGTEWSNYKTTPPVLDSDGSFFLVSKLTVTKEEWQQ |
| | GFVFSCSVMHEALHNHYTQKSLSLSPGK (SEQ ID NO: 2333) |
| Clone CH3C.35.23 | APEAAGGPSVFLFPPKPKDTLMISRTPEVTCVVVDVSHEDPEVKFNWY |
| with hole and LALA | VDGVEVHNAKTKPREEQYNSTYRVVSVLTVLHQDWLNGKEYKCKV |
| mutations | SNKALPAPIEKTISKAKGQPREPQVYTLPPSRDELTKNQVSLSCAVKGF |
| | YPSDIAVEWESYGTEWSNYKTTPPVLDSDGSFFLVSKLTVTKEEWQQ |
| | GFVFSCSVMHEALHNHYTQKSLSLSPGK (SEQ ID NO: 2334) |
| Clone CH3C.35.23 | APEAAGGPSVFLFPPKPKDTLMISRTPEVTCVVVDVSHEDPEVKFNWY |
| with hole and | VDGVEVHNAKTKPREEQYNSTYRVVSVLTVLHQDWLNGKEYKCKV |
| LALAPG mutations | SNKALGAPIEKTISKAKGQPREPQVYTLPPSRDELTKNQVSLSCAVKG |
| | FYPSDIAVEWESYGTEWSNYKTTPPVLDSDGSFFLVSKLTVTKEEWQ |
| | QGFVFSCSVMHEALHNHYTQKSLSLSPGK (SEQ ID NO: 2335) |
| Clone CH3C.35.23 | APELLGGPSVFLFPPKPKDTLYITREPEVTCVVVDVSHEDPEVKFNWY |
| with hole and YTE | VDGVEVHNAKTKPREEQYNSTYRVVSVLTVLHQDWLNGKEYKCKV |
| mutations | SNKALPAPIEKTISKAKGQPREPQVYTLPPSRDELTKNQVSLSCAVKGF |
| | YPSDIAVEWESYGTEWSNYKTTPPVLDSDGSFFLVSKLTVTKEEWQQ |
| | GFVFSCSVMHEALHNHYTQKSLSLSPGK (SEQ ID NO: 2336) |
| Clone CH3C.35.23 | APEAAGGPSVFLFPPKPKDTLYITREPEVTCVVVDVSHEDPEVKFNWY |
| with hole. LALA, and | VDGVEVHNAKTKPREEQYNSTYRVVSVLTVLHQDWLNGKEYKCKV |
| YTE mutations | SNKALPAPIEKTISKAKGQPREPQVYTLPPSRDELTKNQVSLSCAVKGF |
| | YPSDIAVEWESYGTEWSNYKTTPPVLDSDGSFFLVSKLTVTKEEWQQ |
| | GFVFSCSVMHEALHNHYTQKSLSLSPGK (SEQ ID NO: 2337) |
| Clone CH3C.35.23 | APEAAGGPSVFLFPPKPKDTLYITREPEVTCVVVDVSHEDPEVKFNWY |
| with hole, LALAPG, | VDGVEVHNAKTKPREEQYNSTYRVVSVLTVLHQDWLNGKEYKCKV |
| and YTE mutations | SNKALGAPIEKTISKAKGQPREPQVYTLPPSRDELTKNQVSLSCAVKG |
| | FYPSDIAVEWESYGTEWSNYKTTPPVLDSDGSFFLVSKLTVTKEEWQ |
| | QGFVFSCSVMHEALHNHYTQKSLSLSPGK (SEQ ID NO: 2338) |
| CH3C motif | YxTEWSS (SEQ ID NO: 2339) |
| CH3C motif | TxxExxxxF (SEQ ID NO: 2340) |
| mulgGI 3′ VH PCR | GGACAGGGATCCAGAGTTCC (SEQ ID NO: 2341) |
| primer | |
| mu3/4G2 3′ VH PCR | AGCTGGGAAGGTGTGCACAC (SEQ ID NO: 2342) |
| primer | |
| mu3/4G3 3′ VH PCR | CAGGGGCCAGTGGATAGAC (SEQ ID NO: 2343) |
| primer | |
| muCkappa.1 3′ VL | GACATTGATGTCTTTGGGGT (SEQ ID NO: 2344) |
| PCR primer | |
| muCkappa.2 3′ VL | TTCACTGCCATCAATCTTCC (SEQ ID NO: 2345) |
| PCR primer | |
| 7B10.A2 VH amino | EVQLQQSGPELVKPGASVKMSCKASGYTFTDYNMHWVKQSHGKSLE |
| acid sequence | WIGYINPNNGGTTYNQKFKGKATLTVNKSSSTAYMELRSLTSEDSAV |
| | YYCATYNNHYFDSWGQGTTLTVSS (SEQ ID NO: 2346) |
| 7B10.A2 CDR-H1 | GYTFTDYNMH (SEQ ID NO: 2347) |
| 7B10.A2 CDR-H2 | YINPNNGGTTYNQKFKG (SEQ ID NO: 2348) |
| 7B10.A2 CDR-H3 | ATYNNHYFDS (SEQ ID NO: 2349) |
| 7B10.A2 VL amino | DIQMTQTTSSLSASLGDRVTISCSASQGISNYLNWYQQKPDGTVKLLI |
| acid sequence | YYTSNLHSGVPSRFSGSGSGTDYSLTISNLEPEDIATYYCQQYSNLPYT |
| | FGGGTKLEIK (SEQ ID NO: 2350) |
| 7B10.A2 CDR-L1 | SASQGISNYLN (SEQ ID NO: 2351) |
| 7B10.A2 CDR-L2 | YTSNLHS (SEQ ID NO: 2352) |
| 7B10.A2 CDR-L3 | QQYSNLPYT (SEQ ID NO: 2353) |
| 51D4 VH amino acid | QVHLQQSGPEVVRPGVSVKISCKGSGYTFTDYGMHWVKQSHAKSLE |
| sequence | WIGVISTYNGNTSYNQKYKGKATVTVDKPSSTAYMELVRLTSEDSAI |
| | YYCARDFGYVPFDYWGQGTTLTVSS (SEQ ID NO: 2354) |
| 51D4 CDR-H1 | GYTFTDYGMH (SEQ ID NO: 2355) |
| 51D4 CDR-H2 | VISTYNGNTSYNQKYKG (SEQ ID NO: 2356) |
| 51D4 CDR-H3 | ARDFGYVPFDY (SEQ ID NO: 2357) |
| 51D4 VL amino acid | DVVMTQTPLTLSVTIGQPASISCKSSQSLLDSDGKTYLNWLLQRP |
| sequence | GQSPKRLIYLVSYLDSGVPDRFTGSGSGTDFTLKISRVEADDLGV |
| | YYCWQGTHFPYTFGGGTKLEIK (SEQ ID NO: 2358) |
| 51D4 CDR-L2 | LVSYLDS (SEQ ID NO: 2359) |
| CDR-H1 consensus | GX2X3X4X5X6X7X8X9X10X11, wherein X2 is Y or F; X3 is T, N, or S; X4 is F, |
| sequence | L, or I; X5 is T, S, or K; X6 is D, S, or E; X7 is D or absent; X8 is H, |
| | Y, or T; X9 is A, N, G, V, W, T, or Y; X10 is M, I, or W; and Xis H, Q, or N |
| | (SEQ ID NO: 2360) |
| CDR-H1 consensus | GYX3X4X5X6X7X8X9X10X11, wherein X3 is T or S; X4 is F, L, or I; X5 is |
| sequence | Tor S; X6 is D, S, or E; X7 is D or absent; X8 is H or Y; X9 is A, N, G, V, |
| | W, T, or A; X10 is M, I, or W; and X11 is H, Q, or N (SEQ ID NO: 2361) |
| CDR-H1 consensus | GX2X3X4X5X6X8X9X10X11, wherein X is Y or F; X3 is T or N; X4 is F, L, |
| sequence | or I; X is T, S, or K; X6 is D, S, or E; X8 is H, Y, or T; X is A, N, G, V, |
| | W, T, Y, or A; Xi is M or I; and X is H or Q (SEQ ID NO: 2362) |
| CDR-H1 consensus | GYTX4X5X6X8X9X10X11, wherein X4 is F or L; X is T or S; X6 is D, S, or |
| sequence | E; X8 is H, Y; X9 is A, N, G, V, W, T; X10 is M or I; and X11 is H or Q |
| | (SEQ ID NO: 2363) |
| CDR-H2 consensus | X1X2X3X4X5X6X7X8X9X10YX12X13X14X15X16X17, wherein X1 is D, V, Y, R, |
| sequence | G, or T; X2 is I, S, or V; X3 is L, S, N, D, I, or Y; X4 is P, T, or absent; |
| | X5 is S, Y, N, T, A, G, or F; X6 is I, S, N, T, or D; X7 is G or D; X8 is G, |
| | D, N, R, or S; X9 is R, T, or A; X10 is I, G, S, K, T, N, or R; X12 is G, N, |
| | D, or T; X13 is V, Q, E, or P; X14 is K or S; X15 is F, Y or L; X16 is K, R, |
| | Q, or is absent; and X17 is G, T, D, S, or is absent (SEQ ID NO: 2364) |
| CDR-H2 consensus | X1X2X3X4X5X6X7X8X9X10YX12X13X14X15X16X17, wherein Xi is V, Y, R, G, |
| sequence | or T; X2 is I, S, or V; X3 is S, N, D, I, or Y; X4 is P, T, or absent; X5 |
| | is Y, N, T, A, G, or F; X6 is S, N, T, or D; X7 is G or D; X8 is G, D, N, R, |
| | or S; X9 is T, or A; X10 is I, G, S, K, T, N, or R; X12 is N, D, or T; X13 is |
| | Q, E, or P; X14 is K or 5; X15 is F, Y or L; X16 is K, R, or Q; and Xi is G, T, |
| | D, or S (SEQ ID NO: 2365) |
| CDR-H2 consensus | X1X2X3X4X5X6X7X8X9X10YX12X13KX15X16X17, wherein Xi is V, Y, R, G, |
| sequence | or T; X2 is I, S, or V; X3 is S, N, D, I, or Y ; X4 is P or T; X5 is Y, N, T, |
| | A, or G; X6 is S, N, T, or D; X7 is G or D; X8 is G, D, or N; X9 is T, or A; |
| | X10 is G, S, K, T, N, or R; X12 is N, D, or T; X13 is Q, E, or P; X15 is F or |
| | Y; X16 is K, R, or Q; and X17 is G, T, or D (SEQ ID NO: 2366) |
| CDR-H3 consensus | ARX3X4X5X6X7X8X9X1OYAX13DY, wherein X3 is G or N; X4 is D or G; |
| sequence | X5 is D or I; X6 is S or T; X7 is Y or T; X8 is R or A; X9 is R or G; X10 is G |
| | or Y; and X13 is L or M (SEQ ID NO: 2367) |
| CDR-L1 consensus | X1SSX4SLX7X8X9X10X11X12X13X14X15LX17, wherein X1 is R or K; |
| sequence | X4 is Q or K; X7 is V or L; X8 is H, D, or Y; X9 is I, N, or S; X10 is S or |
| | absent; X11 is D or N; X12 is G or Q; X13 is N, I, or K; X14 is T or S; X15 is |
| | Y or F; and X17 is Q, H, Y, N, or A (SEQ ID NO: 2368) |
| CDR-L1 consensus | X1ASX4X5IX7X8X9LX11, wherein X1 is R, K, or S; X4 is E or Q; X5 is N, |
| sequence | D, or G; X7 is Y or S; X8 is S or N; X9 is N, R, or Y; and X11 is A or N |
| | (SEQ ID NO: 2369) |
| CDR-L2 consensus | X1X2SX4X5X6S, wherein Xi is K, Q, Y, V, or L; X2 is V, M, or T; X4 is N, |
| sequence | K, or Y; X5 is R or L; and X6 is F, A, H, or D (SEQ ID NO: 2370) |
| CDR-L3 consensus | X1X2X3X4X5X6X7X8T, wherein Xi is S, W, or Q; X2 is Q or H; X3 is S, T, |
| sequence | G, Y, or F; X4 is T, F, W, S; X5 is H, S, G, or N; X6 is V, A, F, Y, T, or L; |
| | X7 is P, T, or L; and X8 is Y, F, P, or W (SEQ ID NO: 2371) |
| CDR-L3 consensus | QX2X3X4X5X6PX8T, wherein X2 is Q or H; X3 is Y or F; X4 is F, W, or S; |
| sequence | X5 is S, G, or N; X6 is Y, T, or L; and X8 is P, Y, or W (SEQ ID NO: 2372) |
| Human TREM2 | SGAHNTTVFQGVAGQSLQVSCPYDSMKHWGRRKAWCRQLGEK |
| extracellular domain | GPCQRVVSTHNLWLLSFLRRWNGSTAITDDTLGGTLTITLRNLQP |
| (ECD) amino acid | HDAGLYQCQSLHGSEADTLRKVLVEVLADPLDHRDAGDLWFPG |
| sequence (without | ESESFEDAHVEHSISRSLLEGEIPFPPTS (SEQ ID NO: 2373) |
| signal peptide and | |
| His tag) | |
| Human TREM2 | DLWFPGESES (SEQ ID NO: 2374) |
| peptide | |
| Human TREM2 | DLWFPGESE (SEQ ID NO: 2375) |
| peptide 9-mer amino | |
| acid sequence | |
| Human TREM2 | DLWFP (SEQ ID NO: 2376) |
| peptide sequence | |
| (residues 140-144 of | |
| full-length TREM2) | |
| Clone CH3C.18.3.4-1 | APELLGGPSVFLFPPKPKDTLMISRTPEVTCVVVDVSHEDPEVKFNWY |
| (CH3C.3.4-1) | VDGVEVHNAKTKPREEQYNSTYRVVSVLTVLHQDWLNGKEYKCKV |
| | SNKALPAPIEKTISKAKGQPREPQVYTLPPSRDELTKNQVSLTCLVKGF |
| | YPSDIAVEWESWGFVWSTYKTTPPVLDSDGSFFLYSKLTVPKSNWQQ |
| | GFVFSCSVMHEALHNHYTQKSLSLSPGK (SEQ ID NO: 2377) |
| Clone CH3C.18.3.4- | APELLGGPSVFLFPPKPKDTLMISRTPEVTCVVVDVSHEDPEVKFNWY |
| 19 (CH3C.3.4-19) | VDGVEVHNAKTKPREEQYNSTYRVVSVLTVLHQDWLNGKEYKCKV |
| | SNKALPAPIEKTISKAKGQPREPQVYTLPPSRDELTKNQVSLTCLVKGF |
| | YPSDIAVEWESWGHVWSTYKTTPPVLDSDGSFFLYSKLTVPKSNWQQ |
| | GYVFSCSVMHEALHNHYTQKSLSLSPGK (SEQ ID NO: 2378) |
| Clone CH3C.18.3.2-3 | APELLGGPSVFLFPPKPKDTLMISRTPEVTCVVVDVSHEDPEVKFNWY |
| (CH3C.3.2-3) | VDGVEVHNAKTKPREEQYNSTYRVVSVLTVLHQDWLNGKEYKCKV |
| | SNKALPAPIEKTISKAKGQPREPQVYTLPPSRDELTKNQVSLTCLVKGF |
| | YPSDIAVEWESLGHVWVEQKTTPPVLDSDGSFFLYSKLTVPKSTWQQ |
| | GWVFSCSVMHEALHNHYTQKSLSLSPGK (SEQ ID NO: 2379) |
| Clone CH3C.18.3.2- | APELLGGPSVFLFPPKPKDTLMISRTPEVTCVVVDVSHEDPEVKFNWY |
| 14 (CH3C.3.2-14) | VDGVEVHNAKTKPREEQYNSTYRVVSVLTVLHQDWLNGKEYKCKV |
| | SNKALPAPIEKTISKAKGQPREPQVYTLPPSRDELTKNQVSLTCLVKGF |
| | YPSDIAVEWESLGHVWVGVKTTPPVLDSDGSFFLYSKLTVPKSTWQQ |
| | GWVFSCSVMHEALHNHYTQKSLSLSPGK (SEQ ID NO: 2380) |
| Clone CH3C.18.3.2- | APELLGGPSVFLFPPKPKDTLMISRTPEVTCVVVDVSHEDPEVKFNWY |
| 24 (CH3C.3.2-24) | VDGVEVHNAKTKPREEQYNSTYRVVSVLTVLHQDWLNGKEYKCKV |
| | SNKALPAPIEKTISKAKGQPREPQVYTLPPSRDELTKNQVSLTCLVKGF |
| | YPSDIAVEWESLGHVWVHTKTTPPVLDSDGSFFLYSKLTVPKSTWQQ |
| | GWVFSCSVMHEALHNHYTQKSLSLSPGK (SEQ ID NO: 2381) |
| Clone CH3C.18.3.4- | APELLGGPSVFLFPPKPKDTLMISRTPEVTCVVVDVSHEDPEVKFNWY |
| 26 (CH3C.3.4-26) | VDGVEVHNAKTKPREEQYNSTYRVVSVLTVLHQDWLNGKEYKCKV |
| | SNKALPAPIEKTISKAKGQPREPQVYTLPPSRDELTKNQVSLTCLVKGF |
| | YPSDIAVEWESWGTVWGTYKTTPPVLDSDGSFFLYSKLTVPKSNWQQ |
| | GYVFSCSVMHEALHNHYTQKSLSLSPGK (SEQ ID NO: 2382) |
| Clone CH3C.18.3.2- | APELLGGPSVFLFPPKPKDTLMISRTPEVTCVVVDVSHEDPEVKFNWY |
| 17 (CH3C.3.2-17) | VDGVEVHNAKTKPREEQYNSTYRVVSVLTVLHQDWLNGKEYKCKV |
| | SNKALPAPIEKTISKAKGQPREPQVYTLPPSRDELTKNQVSLTCLVKGF |
| | YPSDIAVEWESLGHVWVGTKTTPPVLDSDGSFFLYSKLTVPKSTWQQ |
| | GWVFSCSVMHEALHNHYTQKSLSLSPGK (SEQ ID NO: 2383) |
| Clone | APELLGGPSVFLFPPKPKDTLMISRTPEVTCVVVDVSHEDPEVKFNWY |
| CH3C.35.20.1.1 | VDGVEVHNAKTKPREEQYNSTYRVVSVLTVLHQDWLNGKEYKCKV |
| | SNKALPAPIEKTISKAKGQPREPQVYTLPPSRDELTKNQVSLTCLVKGF |
| | YPSDIAVEWESFGTEWSSYKTTPPVLDSDGSFFLYSKLTVSKEEWQQG |
| | FVFSCSVMHEALHNHYTQKSLSLSPGK (SEQ ID NO: 2384) |
| Clone | APELLGGPSVFLFPPKPKDTLMISRTPEVTCVVVDVSHEDPEVKFNWY |
| CH3C.35.23.2.1 | VDGVEVHNAKTKPREEQYNSTYRVVSVLTVLHQDWLNGKEYKCKV |
| | SNKALPAPIEKTISKAKGQPREPQVYTLPPSRDELTKNQVSLTCLVKGF |
| | YPSDIAVEWESYGTEWANYKTTPPVLDSDGSFFLYSKLTVSKSEWQQ |
| | GFVFSCSVMHEALHNHYTQKSLSLSPGK (SEQ ID NO: 2385) |
| Clone CH3C.35.23.1.1 | APELLGGPSVFLFPPKPKDTLMISRTPEVTCVVVDVSHEDPEVKFNWY |
| | VDGVEVHNAKTKPREEQYNSTYRVVSVLTVLHQDWLNGKEYKCKV |
| | SNKALPAPIEKTISKAKGQPREPQVYTLPPSRDELTKNQVSLTCLVKGF |
| | YPSDIAVEWESFGTEWSNYKTTPPVLDSDGSFFLYSKLTVSKEEWQQG |
| | FVFSCSVMHEALHNHYTQKSLSLSPGK (SEQ ID NO: 2386) |
| Clone CH3C.35.S413 | APELLGGPSVFLFPPKPKDTLMISRTPEVTCVVVDVSHEDPEVKFNWY |
| | VDGVEVHNAKTKPREEQYNSTYRVVSVLTVLHQDWLNGKEYKCKV |
| | SNKALPAPIEKTISKAKGQPREPQVYTLPPSRDELTKNQVSLTCLVKGF |
| | YPSDIAVEWESYGTEWSSYKTTPPVLDSDGSFFLYSKLTVSKSEWQQG |
| | FVFSCSVMHEALHNHYTQKSLSLSPGK (SEQ ID NO: 2387) |
| Clone | APELLGGPSVFLFPPKPKDTLMISRTPEVTCVVVDVSHEDPEVKFNWY |
| CH3C.35.23.3.1 | VDGVEVHNAKTKPREEQYNSTYRVVSVLTVLHQDWLNGKEYKCKV |
| | SNKALPAPIEKTISKAKGQPREPQVYTLPPSRDELTKNQVSLTCLVKGF |
| | YPSDIAVEWESYGTEWVNYKTTPPVLDSDGSFFLYSKLTVSKEEWQQ |
| | GFVFSCSVMHEALHNHYTQKSLSLSPGK (SEQ ID NO: 2388) |
| Clone | APELLGGPSVFLFPPKPKDTLMISRTPEVTCVVVDVSHEDPEVKFNWY |
| CH3C.35.N390.1 | VDGVEVHNAKTKPREEQYNSTYRVVSVLTVLHQDWLNGKEYKCKV |
| | SNKALPAPIEKTISKAKGQPREPQVYTLPPSRDELTKNQVSLTCLVKGF |
| | YPSDIAVEWESYGTEWSNYKTTPPVLDSDGSFFLYSKLTVSKSEWQQ |
| | GFVFSCSVMHEALHNHYTQKSLSLSPGK (SEQ ID NO: 2389) |
| Clone | APELLGGPSVFLFPPKPKDTLMISRTPEVTCVVVDVSHEDPEVKFNWY |
| CH3C.35.23.6.1 | VDGVEVHNAKTKPREEQYNSTYRVVSVLTVLHQDWLNGKEYKCKV |
| | SNKALPAPIEKTISKAKGQPREPQVYTLPPSRDELTKNQVSLTCLVKGF |
| | YPSDIAVEWESFGTEWVNYKTTPPVLDSDGSFFLYSKLTVSKEEWQQ |
| | GFVFSCSVMHEALHNHYTQKSLSLSPGK (SEQ ID NO: 2390) |
| Clone CH3C.35.21 | APEAAGGPSVFLFPPKPKDTLMISRTPEVTCVVVDVSHEDPEVKFNWY |
| with knob and | VDGVEVHNAKTKPREEQYNSTYRVVSVLTVLHQDWLNGKEYKCKV |
| LALAPG mutations | SNKALGAPIEKTISKAKGQPREPQVYTLPPSRDELTKNQVSLWCLVKG |
| | FYPSDIAVWWESYGTEWSSYKTTPPVLDSDGSFFLYSKLTVTKEEWQ |
| | QGFVFSCSVMHEALHNHYTQKSLSLSPGK (SEQ ID NO: 2391) |
| Clone CH3C.35.21 | APEAAGGPSVFLFPPKPKDTLYITREPEVTCVVVDVSHEDPEVKFNWY |
| with knob, LALAPG, | VDGVEVHNAKTKPREEQYNSTYRVVSVLTVLHQDWLNGKEYKCKV |
| and YTE mutations | SNKALGAPIEKTISKAKGQPREPQVYTLPPSRDELTKNQVSLWCLVKG |
| | FYPSDIAVWWESYGTEWSSYKTTPPVLDSDGSFFLYSKLTVTKEEWQ |
| | QGFVFSCSVMHEALHNHYTQKSLSLSPGK (SEQ ID NO: 2392) |
| Clone CH3C.35.21 | APEAAGGPSVFLFPPKPKDTLMISRTPEVTCVVVDVSHEDPEVKFNWY |
| with hole and | VDGVEVHNAKTKPREEQYNSTYRVVSVLTVLHQDWLNGKEYKCKV |
| LALAPG mutations | SNKALGAPIEKTISKAKGQPREPQVYTLPPSRDELTKNQVSLSCAVKG |
| | FYPSDIAVWWESYGTEWSSYKTTPPVLDSDGSFFLVSKLTVTKEEWQ |
| | QGFVFSCSVMHEALHNHYTQKSLSLSPGK (SEQ ID NO: 2393) |
| Clone CH3C.35.21 | APEAAGGPSVFLFPPKPKDTLYITREPEVTCVVVDVSHEDPEVKFNWY |
| with hole, LALAPG, | VDGVEVHNAKTKPREEQYNSTYRVVSVLTVLHQDWLNGKEYKCKV |
| and YTE mutations | SNKALGAPIEKTISKAKGQPREPQVYTLPPSRDELTKNQVSLSCAVKG |
| | FYPSDIAVWWESYGTEWSSYKTTPPVLDSDGSFFLVSKLTVTKEEWQ |
| | QGFVFSCSVMHEALHNHYTQKSLSLSPGK (SEQ ID NO: 2394) |
| Clone | APELLGGPSVFLFPPKPKDTLMISRTPEVTCVVVDVSHEDPEVKFNWY |
| CH3C.35.20.1.1 with | VDGVEVHNAKTKPREEQYNSTYRVVSVLTVLHQDWLNGKEYKCKV |
| knob mutation | SNKALPAPIEKTISKAKGQPREPQVYTLPPSRDELTKNQVSLWCLVKG |
| | FYPSDIAVEWESFGTEWSSYKTTPPVLDSDGSFFLYSKLTVSKEEWQQ |
| | GFVFSCSVMHEALHNHYTQKSLSLSPGK (SEQ ID NO: 2395) |
| Clone | APEAAGGPSVFLFPPKPKDTLMISRTPEVTCVVVDVSHEDPEVKFNWY |
| CH3C.35.20.1.1 with | VDGVEVHNAKTKPREEQYNSTYRVVSVLTVLHQDWLNGKEYKCKV |
| knob and LALA | SNKALPAPIEKTISKAKGQPREPQVYTLPPSRDELTKNQVSLWCLVKG |
| mutations | FYPSDIAVEWESFGTEWSSYKTTPPVLDSDGSFFLYSKLTVSKEEWQQ |
| | GFVFSCSVMHEALHNHYTQKSLSLSPGK (SEQ ID NO: 2396) |
| Clone | APEAAGGPSVFLFPPKPKDTLMISRTPEVTCVVVDVSHEDPEVKFNWY |
| CH3C.35.20.1.1 with | VDGVEVHNAKTKPREEQYNSTYRVVSVLTVLHQDWLNGKEYKCKV |
| knob and LALAPG | SNKALGAPIEKTISKAKGQPREPQVYTLPPSRDELTKNQVSLWCLVKG |
| mutations | FYPSDIAVEWESFGTEWSSYKTTPPVLDSDGSFFLYSKLTVSKEEWQQ |
| | GFVFSCSVMHEALHNHYTQKSLSLSPGK (SEQ ID NO: 2397) |
| Clone | APELLGGPSVFLFPPKPKDTLYITREPEVTCVVVDVSHEDPEVKFNWY |
| CH3C.35.20.1.1 with | VDGVEVHNAKTKPREEQYNSTYRVVSVLTVLHQDWLNGKEYKCKV |
| knob and YTE | SNKALPAPIEKTISKAKGQPREPQVYTLPPSRDELTKNQVSLWCLVKG |
| mutations | FYPSDIAVEWESFGTEWSSYKTTPPVLDSDGSFFLYSKLTVSKEEWQQ |
| | GFVFSCSVMHEALHNHYTQKSLSLSPGK (SEQ ID NO: 2398) |
| Clone | APEAAGGPSVFLFPPKPKDTLYITREPEVTCVVVDVSHEDPEVKFNWY |
| CH3C.35.20.1.1 with | VDGVEVHNAKTKPREEQYNSTYRVVSVLTVLHQDWLNGKEYKCKV |
| knob, LALA, and | SNKALPAPIEKTISKAKGQPREPQVYTLPPSRDELTKNQVSLWCLVKG |
| YTE mutations | FYPSDIAVEWESFGTEWSSYKTTPPVLDSDGSFFLYSKLTVSKEEWQQ |
| | GFVFSCSVMHEALHNHYTQKSLSLSPGK (SEQ ID NO: 2399) |
| Clone | APEAAGGPSVFLFPPKPKDTLYITREPEVTCVVVDVSHEDPEVKFNWY |
| CH3C.35.20.1.1 with | VDGVEVHNAKTKPREEQYNSTYRVVSVLTVLHQDWLNGKEYKCKV |
| knob, LALAPG, and | SNKALGAPIEKTISKAKGQPREPQVYTLPPSRDELTKNQVSLWCLVKG |
| YTE mutations | FYPSDIAVEWESFGTEWSSYKTTPPVLDSDGSFFLYSKLTVSKEEWQQ |
| | GFVFSCSVMHEALHNHYTQKSLSLSPGK (SEQ ID NO: 2400) |
| Clone | APELLGGPSVFLFPPKPKDTLMISRTPEVTCVVVDVSHEDPEVKFNWY |
| CH3C.35.20.1.1 with | VDGVEVHNAKTKPREEQYNSTYRVVSVLTVLHQDWLNGKEYKCKV |
| hole mutations | SNKALPAPIEKTISKAKGQPREPQVYTLPPSRDELTKNQVSLSCAVKGF |
| | YPSDIAVEWESFGTEWSSYKTTPPVLDSDGSFFLVSKLTVSKEEWQQG |
| | FVFSCSVMHEALHNHYTQKSLSLSPGK (SEQ ID NO: 2401) |
| Clone | APEAAGGPSVFLFPPKPKDTLMISRTPEVTCVVVDVSHEDPEVKFNWY |
| CH3C.35.20.1.1 with | VDGVEVHNAKTKPREEQYNSTYRVVSVLTVLHQDWLNGKEYKCKV |
| hole and LALA | SNKALPAPIEKTISKAKGQPREPQVYTLPPSRDELTKNQVSLSCAVKGF |
| mutations | YPSDIAVEWESFGTEWSSYKTTPPVLDSDGSFFLVSKLTVSKEEWQQG |
| | FVFSCSVMHEALHNHYTQKSLSLSPGK (SEQ ID NO: 2402) |
| Clone | APEAAGGPSVFLFPPKPKDTLMISRTPEVTCVVVDVSHEDPEVKFNWY |
| CH3C.35.20.1.1 with | VDGVEVHNAKTKPREEQYNSTYRVVSVLTVLHQDWLNGKEYKCKV |
| hole and LALAPG | SNKALGAPIEKTISKAKGQPREPQVYTLPPSRDELTKNQVSLSCAVKG |
| mutations | FYPSDIAVEWESFGTEWSSYKTTPPVLDSDGSFFLVSKLTVSKEEWQQ |
| | GFVFSCSVMHEALHNHYTQKSLSLSPGK (SEQ ID NO: 2403) |
| Clone | APELLGGPSVFLFPPKPKDTLYITREPEVTCVVVDVSHEDPEVKFNWY |
| CH3C.35.20.1.1 with | VDGVEVHNAKTKPREEQYNSTYRVVSVLTVLHQDWLNGKEYKCKV |
| hole and YTE | SNKALPAPIEKTISKAKGQPREPQVYTLPPSRDELTKNQVSLSCAVKGF |
| mutations | YPSDIAVEWESFGTEWSSYKTTPPVLDSDGSFFLVSKLTVSKEEWQQG |
| | FVFSCSVMHEALHNHYTQKSLSLSPGK (SEQ ID NO: 2404) |
| Clone | APEAAGGPSVFLFPPKPKDTLYITREPEVTCVVVDVSHEDPEVKFNWY |
| CH3C.35.20.1.1 with | VDGVEVHNAKTKPREEQYNSTYRVVSVLTVLHQDWLNGKEYKCKV |
| hole, LALA, and YTE | SNKALPAPIEKTISKAKGQPREPQVYTLPPSRDELTKNQVSLSCAVKGF |
| mutations | YPSDIAVEWESFGTEWSSYKTTPPVLDSDGSFFLVSKLTVSKEEWQQG |
| | FVFSCSVMHEALHNHYTQKSLSLSPGK (SEQ ID NO: 2405) |
| Clone | APEAAGGPSVFLFPPKPKDTLYITREPEVTCVVVDVSHEDPEVKFNWY |
| CH3C.35.20.1.1 with | VDGVEVHNAKTKPREEQYNSTYRVVSVLTVLHQDWLNGKEYKCKV |
| hole, LALAPG, and | SNKALGAPIEKTISKAKGQPREPQVYTLPPSRDELTKNQVSLSCAVKG |
| YTE mutations | FYPSDIAVEWESFGTEWSSYKTTPPVLDSDGSFFLVSKLTVSKEEWQQ |
| | GFVFSCSVMHEALHNHYTQKSLSLSPGK (SEQ ID NO: 2406) |
| Clone | APELLGGPSVFLFPPKPKDTLMISRTPEVTCVVVDVSHEDPEVKFNWY |
| CH3C.35.23.2.1 with | VDGVEVHNAKTKPREEQYNSTYRVVSVLTVLHQDWLNGKEYKCKV |
| knob mutation | SNKALPAPIEKTISKAKGQPREPQVYTLPPSRDELTKNQVSLWCLVKG |
| | FYPSDIAVEWESYGTEWANYKTTPPVLDSDGSFFLYSKLTVSKSEWQ |
| | QGFVFSCSVMHEALHNHYTQKSLSLSPGK (SEQ ID NO: 2407) |
| Clone | APEAAGGPSVFLFPPKPKDTLMISRTPEVTCVVVDVSHEDPEVKFNWY |
| CH3C.35.23.2.1 with | VDGVEVHNAKTKPREEQYNSTYRVVSVLTVLHQDWLNGKEYKCKV |
| knob and LALA | SNKALPAPIEKTISKAKGQPREPQVYTLPPSRDELTKNQVSLWCLVKG |
| mutations | FYPSDIAVEWESYGTEWANYKTTPPVLDSDGSFFLYSKLTVSKSEWQ |
| | QGFVFSCSVMHEALHNHYTQKSLSLSPGK (SEQ ID NO: 2408) |
| Clone | APEAAGGPSVFLFPPKPKDTLMISRTPEVTCVVVDVSHEDPEVKFNWY |
| CH3C.35.23.2.1 with | VDGVEVHNAKTKPREEQYNSTYRVVSVLTVLHQDWLNGKEYKCKV |
| knob and LALAPG | SNKALGAPIEKTISKAKGQPREPQVYTLPPSRDELTKNQVSLWCLVKG |
| mutations | FYPSDIAVEWESYGTEWANYKTTPPVLDSDGSFFLYSKLTVSKSEWQ |
| | QGFVFSCSVMHEALHNHYTQKSLSLSPGK (SEQ ID NO: 2409) |
| Clone | APELLGGPSVFLFPPKPKDTLYITREPEVTCVVVDVSHEDPEVKFNWY |
| CH3C.35.23.2.1 with | VDGVEVHNAKTKPREEQYNSTYRVVSVLTVLHQDWLNGKEYKCKV |
| knob and YTE | SNKALPAPIEKTISKAKGQPREPQVYTLPPSRDELTKNQVSLWCLVKG |
| mutations | FYPSDIAVEWESYGTEWANYKTTPPVLDSDGSFFLYSKLTVSKSEWQ |
| | QGFVFSCSVMHEALHNHYTQKSLSLSPGK (SEQ ID NO: 2410) |
| Clone | APEAAGGPSVFLFPPKPKDTLYITREPEVTCVVVDVSHEDPEVKFNWY |
| CH3C.35.23.2.1 with | VDGVEVHNAKTKPREEQYNSTYRVVSVLTVLHQDWLNGKEYKCKV |
| knob, LALA, and | SNKALPAPIEKTISKAKGQPREPQVYTLPPSRDELTKNQVSLWCLVKG |
| YTE mutations | FYPSDIAVEWESYGTEWANYKTTPPVLDSDGSFFLYSKLTVSKSEWQ |
| | QGFVFSCSVMHEALHNHYTQKSLSLSPGK (SEQ ID NO: 2411) |
| Clone | APEAAGGPSVFLFPPKPKDTLYITREPEVTCVVVDVSHEDPEVKFNWY |
| CH3C.35.23.2.1 with | VDGVEVHNAKTKPREEQYNSTYRVVSVLTVLHQDWLNGKEYKCKV |
| knob, LALAPG, and | SNKALGAPIEKTISKAKGQPREPQVYTLPPSRDELTKNQVSLWCLVKG |
| YTE mutations | FYPSDIAVEWESYGTEWANYKTTPPVLDSDGSFFLYSKLTVSKSEWQ |
| | QGFVFSCSVMHEALHNHYTQKSLSLSPGK (SEQ ID NO: 2412) |
| Clone | APELLGGPSVFLFPPKPKDTLMISRTPEVTCVVVDVSHEDPEVKFNWY |
| CH3C.35.23.2.1 with | VDGVEVHNAKTKPREEQYNSTYRVVSVLTVLHQDWLNGKEYKCKV |
| hole mutations | SNKALPAPIEKTISKAKGQPREPQVYTLPPSRDELTKNQVSLSCAVKGF |
| | YPSDIAVEWESYGTEWANYKTTPPVLDSDGSFFLVSKLTVSKSEWQQ |
| | GFVFSCSVMHEALHNHYTQKSLSLSPGK (SEQ ID NO: 2413) |
| Clone | APEAAGGPSVFLFPPKPKDTLMISRTPEVTCVVVDVSHEDPEVKFNWY |
| CH3C.35.23.2.1 with | VDGVEVHNAKTKPREEQYNSTYRVVSVLTVLHQDWLNGKEYKCKV |
| hole and LALA | SNKALPAPIEKTISKAKGQPREPQVYTLPPSRDELTKNQVSLSCAVKGF |
| mutations | YPSDIAVEWESYGTEWANYKTTPPVLDSDGSFFLVSKLTVSKSEWQQ |
| | GFVFSCSVMHEALHNHYTQKSLSLSPGK (SEQ ID NO: 2414) |
| Clone | APEAAGGPSVFLFPPKPKDTLMISRTPEVTCVVVDVSHEDPEVKFNWY |
| CH3C.35.23.2.1 with | VDGVEVHNAKTKPREEQYNSTYRVVSVLTVLHQDWLNGKEYKCKV |
| hole and LALAPG | SNKALGAPIEKTISKAKGQPREPQVYTLPPSRDELTKNQVSLSCAVKG |
| mutations | FYPSDIAVEWESYGTEWANYKTTPPVLDSDGSFFLVSKLTVSKSEWQ |
| | QGFVFSCSVMHEALHNHYTQKSLSLSPGK (SEQ ID NO: 2415) |
| Clone | APELLGGPSVFLFPPKPKDTLYITREPEVTCVVVDVSHEDPEVKFNWY |
| CH3C.35.23.2.1 with | VDGVEVHNAKTKPREEQYNSTYRVVSVLTVLHQDWLNGKEYKCKV |
| hole and YTE | SNKALPAPIEKTISKAKGQPREPQVYTLPPSRDELTKNQVSLSCAVKGF |
| mutations | YPSDIAVEWESYGTEWANYKTTPPVLDSDGSFFLVSKLTVSKSEWQQ |
| | GFVFSCSVMHEALHNHYTQKSLSLSPGK (SEQ ID NO: 2416) |
| Clone | APEAAGGPSVFLFPPKPKDTLYITREPEVTCVVVDVSHEDPEVKFNWY |
| CH3C.35.23.2.1 with | VDGVEVHNAKTKPREEQYNSTYRVVSVLTVLHQDWLNGKEYKCKV |
| hole, LALA, and YTE | SNKALPAPIEKTISKAKGQPREPQVYTLPPSRDELTKNQVSLSCAVKGF |
| mutations | YPSDIAVEWESYGTEWANYKTTPPVLDSDGSFFLVSKLTVSKSEWQQ |
| | GFVFSCSVMHEALHNHYTQKSLSLSPGK (SEQ ID NO: 2417) |
| Clone | APEAAGGPSVFLFPPKPKDTLYITREPEVTCVVVDVSHEDPEVKFNWY |
| CH3C.35.23.2.1 with | VDGVEVHNAKTKPREEQYNSTYRVVSVLTVLHQDWLNGKEYKCKV |
| hole, LALAPG, and | SNKALGAPIEKTISKAKGQPREPQVYTLPPSRDELTKNQVSLSCAVKG |
| YTE mutations | FYPSDIAVEWESYGTEWANYKTTPPVLDSDGSFFLVSKLTVSKSEWQ |
| | QGFVFSCSVMHEALHNHYTQKSLSLSPGK (SEQ ID NO: 2418) |
| Clone CH3C.35.23.1.1 | APELLGGPSVFLFPPKPKDTLMISRTPEVTCVVVDVSHEDPEVKFNWY |
| with knob | VDGVEVHNAKTKPREEQYNSTYRVVSVLTVLHQDWLNGKEYKCKV |
| mutation | SNKALPAPIEKTISKAKGQPREPQVYTLPPSRDELTKNQVSLWCLVKG |
| | FYPSDIAVEWESFGTEWSNYKTTPPVLDSDGSFFLYSKLTVSKEEWQQ |
| | GFVFSCSVMHEALHNHYTQKSLSLSPGK (SEQ ID NO: 2419) |
| Clone CH3C.35.23.1.1 | APEAAGGPSVFLFPPKPKDTLMISRTPEVTCVVVDVSHEDPEVKFNWY |
| with knob and | VDGVEVHNAKTKPREEQYNSTYRVVSVLTVLHQDWLNGKEYKCKV |
| LALA mutations | SNKALPAPIEKTISKAKGQPREPQVYTLPPSRDELTKNQVSLWCLVKG |
| | FYPSDIAVEWESFGTEWSNYKTTPPVLDSDGSFFLYSKLTVSKEEWQQ |
| | GFVFSCSVMHEALHNHYTQKSLSLSPGK (SEQ ID NO: 2420) |
| Clone CH3C.35.23.1.1 | APEAAGGPSVFLFPPKPKDTLMISRTPEVTCVVVDVSHEDPEVKFNWY |
| with knob and | VDGVEVHNAKTKPREEQYNSTYRVVSVLTVLHQDWLNGKEYKCKV |
| LALAPG mutations | SNKALGAPIEKTISKAKGQPREPQVYTLPPSRDELTKNQVSLWCLVKG |
| | FYPSDIAVEWESFGTEWSNYKTTPPVLDSDGSFFLYSKLTVSKEEWQQ |
| | GFVFSCSVMHEALHNHYTQKSLSLSPGK (SEQ ID NO: 2421) |
| Clone CH3C.35.23.1.1 | APELLGGPSVFLFPPKPKDTLYITREPEVTCVVVDVSHEDPEVKFNWY |
| with knob and | VDGVEVHNAKTKPREEQYNSTYRVVSVLTVLHQDWLNGKEYKCKV |
| YTE mutations | SNKALPAPIEKTISKAKGQPREPQVYTLPPSRDELTKNQVSLWCLVKG |
| | FYPSDIAVEWESFGTEWSNYKTTPPVLDSDGSFFLYSKLTVSKEEWQQ |
| | GFVFSCSVMHEALHNHYTQKSLSLSPGK (SEQ ID NO: 2422) |
| Clone CH3C.35.23.1.1 | APEAAGGPSVFLFPPKPKDTLYITREPEVTCVVVDVSHEDPEVKFNWY |
| with knob, LALA, | VDGVEVHNAKTKPREEQYNSTYRVVSVLTVLHQDWLNGKEYKCKV |
| and YTE mutations | SNKALPAPIEKTISKAKGQPREPQVYTLPPSRDELTKNQVSLWCLVKG |
| | FYPSDIAVEWESFGTEWSNYKTTPPVLDSDGSFFLYSKLTVSKEEWQQ |
| | GFVFSCSVMHEALHNHYTQKSLSLSPGK (SEQ ID NO: 2423) |
| Clone CH3C.35.23.1.1 | APEAAGGPSVFLFPPKPKDTLYITREPEVTCVVVDVSHEDPEVKFNWY |
| with knob, | VDGVEVHNAKTKPREEQYNSTYRVVSVLTVLHQDWLNGKEYKCKV |
| LALAPG, and YTE | SNKALGAPIEKTISKAKGQPREPQVYTLPPSRDELTKNQVSLWCLVKG |
| mutations | FYPSDIAVEWESFGTEWSNYKTTPPVLDSDGSFFLYSKLTVSKEEWQQ |
| | GFVFSCSVMHEALHNHYTQKSLSLSPGK (SEQ ID NO: 2424) |
| Clone CH3C.35.23.1.1 | APELLGGPSVFLFPPKPKDTLMISRTPEVTCVVVDVSHEDPEVKFNWY |
| with hole | VDGVEVHNAKTKPREEQYNSTYRVVSVLTVLHQDWLNGKEYKCKV |
| mutations | SNKALPAPIEKTISKAKGQPREPQVYTLPPSRDELTKNQVSLSCAVKGF |
| | YPSDIAVEWESFGTEWSNYKTTPPVLDSDGSFFLVSKLTVSKEEWQQG |
| | FVFSCSVMHEALHNHYTQKSLSLSPGK (SEQ ID NO: 2425) |
| Clone CH3C.35.23.1.1 | APEAAGGPSVFLFPPKPKDTLMISRTPEVTCVVVDVSHEDPEVKFNWY |
| with hole and | VDGVEVHNAKTKPREEQYNSTYRVVSVLTVLHQDWLNGKEYKCKV |
| LALA mutations | SNKALPAPIEKTISKAKGQPREPQVYTLPPSRDELTKNQVSLSCAVKGF |
| | YPSDIAVEWESFGTEWSNYKTTPPVLDSDGSFFLVSKLTVSKEEWQQG |
| | FVFSCSVMHEALHNHYTQKSLSLSPGK (SEQ ID NO: 2426) |
| Clone CH3C.35.23.1.1 | APEAAGGPSVFLFPPKPKDTLMISRTPEVTCVVVDVSHEDPEVKFNWY |
| with hole and | VDGVEVHNAKTKPREEQYNSTYRVVSVLTVLHQDWLNGKEYKCKV |
| LALAPG mutations | SNKALGAPIEKTISKAKGQPREPQVYTLPPSRDELTKNQVSLSCAVKG |
| | FYPSDIAVEWESFGTEWSNYKTTPPVLDSDGSFFLVSKLTVSKEEWQQ |
| | GFVFSCSVMHEALHNHYTQKSLSLSPGK (SEQ ID NO: 2427) |
| Clone CH3C.35.23.1.1 | APELLGGPSVFLFPPKPKDTLYITREPEVTCVVVDVSHEDPEVKFNWY |
| with hole and | VDGVEVHNAKTKPREEQYNSTYRVVSVLTVLHQDWLNGKEYKCKV |
| YTE mutations | SNKALPAPIEKTISKAKGQPREPQVYTLPPSRDELTKNQVSLSCAVKGF |
| | YPSDIAVEWESFGTEWSNYKTTPPVLDSDGSFFLVSKLTVSKEEWQQG |
| | FVFSCSVMHEALHNHYTQKSLSLSPGK (SEQ ID NO: 2428) |
| Clone CH3C.35.23.1.1 | APEAAGGPSVFLFPPKPKDTLYITREPEVTCVVVDVSHEDPEVKFNWY |
| with hole, LALA, | VDGVEVHNAKTKPREEQYNSTYRVVSVLTVLHQDWLNGKEYKCKV |
| and YTE mutations | SNKALPAPIEKTISKAKGQPREPQVYTLPPSRDELTKNQVSLSCAVKGF |
| | YPSDIAVEWESFGTEWSNYKTTPPVLDSDGSFFLVSKLTVSKEEWQQG |
| | FVFSCSVMHEALHNHYTQKSLSLSPGK (SEQ ID NO: 2429) |
| Clone CH3C.35.23.1.1 | APEAAGGPSVFLFPPKPKDTLYITREPEVTCVVVDVSHEDPEVKFNWY |
| with hole, | VDGVEVHNAKTKPREEQYNSTYRVVSVLTVLHQDWLNGKEYKCKV |
| LALAPG, and YTE | SNKALGAPIEKTISKAKGQPREPQVYTLPPSRDELTKNQVSLSCAVKG |
| mutations | FYPSDIAVEWESFGTEWSNYKTTPPVLDSDGSFFLVSKLTVSKEEWQQ |
| | GFVFSCSVMHEALHNHYTQKSLSLSPGK (SEQ ID NO: 2430) |
| Clone CH3C.35.20.1 | APELLGGPSVFLFPPKPKDTLMISRTPEVTCVVVDVSHEDPEVKFNWY |
| M428L and N434S | VDGVEVHNAKTKPREEQYNSTYRVVSVLTVLHQDWLNGKEYKCKV |
| mutations | SNKALPAPIEKTISKAKGQPREPQVYTLPPSRDELTKNQVSLTCLVKGF |
| | YPSDIAVEWESFGTEWSSYKTTPPVLDSDGSFFLYSKLTVTKEEWQQG |
| | FVFSCSVLHEALHSHYTQKSLSLSPGK (SEQ ID NO: 2431) |
| Clone CH3C.35.20.1 | APELLGGPSVFLFPPKPKDTLMISRTPEVTCVVVDVSHEDPEVKFNWY |
| with knob and M428L | VDGVEVHNAKTKPREEQYNSTYRVVSVLTVLHQDWLNGKEYKCKV |
| and N4345 mutations | SNKALPAPIEKTISKAKGQPREPQVYTLPPSRDELTKNQVSLWCLVKG |
| | FYPSDIAVEWESFGTEWSSYKTTPPVLDSDGSFFLYSKLTVTKEEWQQ |
| | GFVFSCSVLHEALHSHYTQKSLSLSPGK (SEQ ID NO: 2432) |
| Clone CH3C.35.20.1 | APEAAGGPSVFLFPPKPKDTLMISRTPEVTCVVVDVSHEDPEVKFNWY |
| with knob, LALA, | VDGVEVHNAKTKPREEQYNSTYRVVSVLTVLHQDWLNGKEYKCKV |
| and M428L and | SNKALPAPIEKTISKAKGQPREPQVYTLPPSRDELTKNQVSLWCLVKG |
| N434S mutations | FYPSDIAVEWESFGTEWSSYKTTPPVLDSDGSFFLYSKLTVTKEEWQQ |
| | GFVFSCSVLHEALHSHYTQKSLSLSPGK (SEQ ID NO: 2433) |
| Clone CH3C.35.20.1 | APEAAGGPSVFLFPPKPKDTLMISRTPEVTCVVVDVSHEDPEVKFNWY |
| with knob, LALAPG, | VDGVEVHNAKTKPREEQYNSTYRVVSVLTVLHQDWLNGKEYKCKV |
| and M428L and | SNKALGAPIEKTISKAKGQPREPQVYTLPPSRDELTKNQVSLWCLVKG |
| N434S mutations | FYPSDIAVEWESFGTEWSSYKTTPPVLDSDGSFFLYSKLTVTKEEWQQ |
| | GFVFSCSVLHEALHSHYTQKSLSLSPGK (SEQ ID NO: 2434) |
| Clone CH3C.35.20.1 | APELLGGPSVFLFPPKPKDTLMISRTPEVTCVVVDVSHEDPEVKFNWY |
| with hole and M428L | VDGVEVHNAKTKPREEQYNSTYRVVSVLTVLHQDWLNGKEYKCKV |
| and N4345 mutations | SNKALPAPIEKTISKAKGQPREPQVYTLPPSRDELTKNQVSLSCAVKGF |
| | YPSDIAVEWESFGTEWSSYKTTPPVLDSDGSFFLVSKLTVTKEEWQQG |
| | FVFSCSVLHEALHSHYTQKSLSLSPGK (SEQ ID NO: 2435) |
| Clone CH3C.35.20.1 | APEAAGGPSVFLFPPKPKDTLMISRTPEVTCVVVDVSHEDPEVKFNWY |
| with hole, LALA, and | VDGVEVHNAKTKPREEQYNSTYRVVSVLTVLHQDWLNGKEYKCKV |
| M428L and N434S | SNKALPAPIEKTISKAKGQPREPQVYTLPPSRDELTKNQVSLSCAVKGF |
| mutations | YPSDIAVEWESFGTEWSSYKTTPPVLDSDGSFFLVSKLTVTKEEWQQG |
| | FVFSCSVLHEALHSHYTQKSLSLSPGK (SEQ ID NO: 2436) |
| Clone CH3C.35.20.1 | APEAAGGPSVFLFPPKPKDTLMISRTPEVTCVVVDVSHEDPEVKFNWY |
| with hole, LALAPG, | VDGVEVHNAKTKPREEQYNSTYRVVSVLTVLHQDWLNGKEYKCKV |
| and M428L and | SNKALGAPIEKTISKAKGQPREPQVYTLPPSRDELTKNQVSLSCAVKG |
| N434S mutations | FYPSDIAVEWESFGTEWSSYKTTPPVLDSDGSFFLVSKLTVTKEEWQQ |
| | GFVFSCSVLHEALHSHYTQKSLSLSPGK (SEQ ID NO: 2437) |
| Clone | APELLGGPSVFLFPPKPKDTLMISRTPEVTCVVVDVSHEDPEVKFNWY |
| CH3C.35.20.1.1 with | VDGVEVHNAKTKPREEQYNSTYRVVSVLTVLHQDWLNGKEYKCKV |
| M428L and N4345 | SNKALPAPIEKTISKAKGQPREPQVYTLPPSRDELTKNQVSLTCLVKGF |
| mutations | YPSDIAVEWESFGTEWSSYKTTPPVLDSDGSFFLYSKLTVSKEEWQQG |
| | FVFSCSVLHEALHSHYTQKSLSLSPGK (SEQ ID NO: 2438) |
| Clone | APELLGGPSVFLFPPKPKDTLMISRTPEVTCVVVDVSHEDPEVKFNWY |
| CH3C.35.20.1.1 with | VDGVEVHNAKTKPREEQYNSTYRVVSVLTVLHQDWLNGKEYKCKV |
| knob and M428L and | SNKALPAPIEKTISKAKGQPREPQVYTLPPSRDELTKNQVSLWCLVKG |
| N434S mutations | FYPSDIAVEWESFGTEWSSYKTTPPVLDSDGSFFLYSKLTVSKEEWQQ |
| | GFVFSCSVLHEALHSHYTQKSLSLSPGK (SEQ ID NO: 2439) |
| Clone | APEAAGGPSVFLFPPKPKDTLMISRTPEVTCVVVDVSHEDPEVKFNWY |
| CH3C.35.20.1.1 with | VDGVEVHNAKTKPREEQYNSTYRVVSVLTVLHQDWLNGKEYKCKV |
| knob, LALA, and | SNKALPAPIEKTISKAKGQPREPQVYTLPPSRDELTKNQVSLWCLVKG |
| M428L and N434S | FYPSDIAVEWESFGTEWSSYKTTPPVLDSDGSFFLYSKLTVSKEEWQQ |
| mutations | GFVFSCSVLHEALHSHYTQKSLSLSPGK (SEQ ID NO: 2440) |
| Clone | APEAAGGPSVFLFPPKPKDTLMISRTPEVTCVVVDVSHEDPEVKFNWY |
| CH3C.35.20.1.1 with | VDGVEVHNAKTKPREEQYNSTYRVVSVLTVLHQDWLNGKEYKCKV |
| knob, LALAPG, and | SNKALGAPIEKTISKAKGQPREPQVYTLPPSRDELTKNQVSLWCLVKG |
| M428L and N434S | FYPSDIAVEWESFGTEWSSYKTTPPVLDSDGSFFLYSKLTVSKEEWQQ |
| mutations | GFVFSCSVLHEALHSHYTQKSLSLSPGK (SEQ ID NO: 2441) |
| APELLGGP | SVFLFPPKPKDTLMISRTPEVTCVVVDVSHEDPEVKFNWY |
| Clone | VDGVEVHNAKTKPREEQYNSTYRVVSVLTVLHQDWLNGKEYKCKV |
| CH3C.35.20.1.1 with | SNKALPAPIEKTISKAKGQPREPQVYTLPPSRDELTKNQVSLSCAVKGF |
| hole and M428L and | YPSDIAVEWESFGTEWSSYKTTPPVLDSDGSFFLVSKLTVSKEEWQQG |
| N434S mutations | FVFSCSVLHEALHSHYTQKSLSLSPGK (SEQ ID NO: 2442) |
| Clone | APEAAGGPSVFLFPPKPKDTLMISRTPEVTCVVVDVSHEDPEVKFNWY |
| CH3C.35.20.1.1 with | VDGVEVHNAKTKPREEQYNSTYRVVSVLTVLHQDWLNGKEYKCKV |
| hole, LALA, and | SNKALPAPIEKTISKAKGQPREPQVYTLPPSRDELTKNQVSLSCAVKGF |
| M428L and N434S | YPSDIAVEWESFGTEWSSYKTTPPVLDSDGSFFLVSKLTVSKEEWQQG |
| mutations | FVFSCSVLHEALHSHYTQKSLSLSPGK (SEQ ID NO: 2443) |
| Clone | APEAAGGPSVFLFPPKPKDTLMISRTPEVTCVVVDVSHEDPEVKFNWY |
| CH3C.35.20.1.1 with | VDGVEVHNAKTKPREEQYNSTYRVVSVLTVLHQDWLNGKEYKCKV |
| hole, LALAPG, and | SNKALGAPIEKTISKAKGQPREPQVYTLPPSRDELTKNQVSLSCAVKG |
| M428L and N434S | FYPSDIAVEWESFGTEWSSYKTTPPVLDSDGSFFLVSKLTVSKEEWQQ |
| mutations | GFVFSCSVLHEALHSHYTQKSLSLSPGK (SEQ ID NO: 2444) |
| Clone CH3C.35.21 | APELLGGPSVFLFPPKPKDTLMISRTPEVTCVVVDVSHEDPEVKFNWY |
| with M428L and | VDGVEVHNAKTKPREEQYNSTYRVVSVLTVLHQDWLNGKEYKCKV |
| N434S mutations | SNKALPAPIEKTISKAKGQPREPQVYTLPPSRDELTKNQVSLTCLVKGF |
| | YPSDIAVWWESYGTEWSSYKTTPPVLDSDGSFFLYSKLTVTKEEWQQ |
| | GFVFSCSVLHEALHSHYTQKSLSLSPGK (SEQ ID NO: 2445) |
| Clone CH3C.35.21 | APELLGGPSVFLFPPKPKDTLMISRTPEVTCVVVDVSHEDPEVKFNWY |
| with knob and M428L | VDGVEVHNAKTKPREEQYNSTYRVVSVLTVLHQDWLNGKEYKCKV |
| and N4345 mutations | SNKALPAPIEKTISKAKGQPREPQVYTLPPSRDELTKNQVSLWCLVKG |
| | FYPSDIAVWWESYGTEWSSYKTTPPVLDSDGSFFLYSKLTVTKEEWQ |
| | QGFVFSCSVLHEALHSHYTQKSLSLSPGK (SEQ ID NO: 2446) |
| Clone CH3C.35.21 | APEAAGGPSVFLFPPKPKDTLMISRTPEVTCVVVDVSHEDPEVKFNWY |
| with knob, LALA, | VDGVEVHNAKTKPREEQYNSTYRVVSVLTVLHQDWLNGKEYKCKV |
| and M428L and | SNKALPAPIEKTISKAKGQPREPQVYTLPPSRDELTKNQVSLWCLVKG |
| N434S mutations | FYPSDIAVWWESYGTEWSSYKTTPPVLDSDGSFFLYSKLTVTKEEWQ |
| | QGFVFSCSVLHEALHSHYTQKSLSLSPGK (SEQ ID NO: 2447) |
| Clone CH3C.35.21 | APEAAGGPSVFLFPPKPKDTLMISRTPEVTCVVVDVSHEDPEVKFNWY |
| with knob, LALAPG, | VDGVEVHNAKTKPREEQYNSTYRVVSVLTVLHQDWLNGKEYKCKV |
| and M428L and | SNKALGAPIEKTISKAKGQPREPQVYTLPPSRDELTKNQVSLWCLVKG |
| N434S mutations | FYPSDIAVWWESYGTEWSSYKTTPPVLDSDGSFFLYSKLTVTKEEWQ |
| | QGFVFSCSVLHEALHSHYTQKSLSLSPGK (SEQ ID NO: 2448) |
| Clone CH3C.35.21 | APELLGGPSVFLFPPKPKDTLMISRTPEVTCVVVDVSHEDPEVKFNWY |
| with hole and M428L | VDGVEVHNAKTKPREEQYNSTYRVVSVLTVLHQDWLNGKEYKCKV |
| and N4345 mutations | SNKALPAPIEKTISKAKGQPREPQVYTLPPSRDELTKNQVSLSCAVKGF |
| | YPSDIAVWWESYGTEWSSYKTTPPVLDSDGSFFLVSKLTVTKEEWQQ |
| | GFVFSCSVLHEALHSHYTQKSLSLSPGK (SEQ ID NO: 2449) |
| Clone CH3C.35.21 | APEAAGGPSVFLFPPKPKDTLMISRTPEVTCVVVDVSHEDPEVKFNWY |
| with hole. LALA, and | VDGVEVHNAKTKPREEQYNSTYRVVSVLTVLHQDWLNGKEYKCKV |
| M428L and N4345 | SNKALPAPIEKTISKAKGQPREPQVYTLPPSRDELTKNQVSLSCAVKGF |
| mutations | YPSDIAVWWESYGTEWSSYKTTPPVLDSDGSFFLVSKLTVTKEEWQQ |
| | GFVFSCSVLHEALHSHYTQKSLSLSPGK (SEQ ID NO: 2450) |
| Clone CH3C.35.21 | APEAAGGPSVFLFPPKPKDTLMISRTPEVTCVVVDVSHEDPEVKFNWY |
| with hole, LALAPG, | VDGVEVHNAKTKPREEQYNSTYRVVSVLTVLHQDWLNGKEYKCKV |
| and M428L and | SNKALGAPIEKTISKAKGQPREPQVYTLPPSRDELTKNQVSLSCAVKG |
| N434S mutations | FYPSDIAVWWESYGTEWSSYKTTPPVLDSDGSFFLVSKLTVTKEEWQ |
| | QGFVFSCSVLHEALHSHYTQKSLSLSPGK (SEQ ID NO: 2451) |
| Clone CH3C.35.21.17.2 | APELLGGPSVFLFPPKPKDTLMISRTPEVTCVVVDVSHEDPEVKFNWY |
| with M428L and | VDGVEVHNAKTKPREEQYNSTYRVVSVLTVLHQDWLNGKEYKCKV |
| N434S mutations | SNKALPAPIEKTISKAKGQPREPQVYTLPPSRDELTKNQVSLTCLVKGF |
| | YPSDIAVLWESYGTEWASYKTTPPVLDSDGSFFLYSKLTVTKEEWQQ |
| | GFVFSCSVLHEALHSHYTQKSLSLSPGK (SEQ ID NO: 2452) |
| Clone CH3C.35.21.17.2 | APELLGGPSVFLFPPKPKDTLMISRTPEVTCVVVDVSHEDPEVKFNWY |
| with knob and | VDGVEVHNAKTKPREEQYNSTYRVVSVLTVLHQDWLNGKEYKCKV |
| M428L and N434S | SNKALPAPIEKTISKAKGQPREPQVYTLPPSRDELTKNQVSLWCLVKG |
| mutations | FYPSDIAVLWESYGTEWASYKTTPPVLDSDGSFFLYSKLTVTKEEWQ |
| | QGFVFSCSVLHEALHSHYTQKSLSLSPGK (SEQ ID NO: 2453) |
| Clone CH3C.35.21.17.2 | APEAAGGPSVFLFPPKPKDTLMISRTPEVTCVVVDVSHEDPEVKFNWY |
| with knob, | VDGVEVHNAKTKPREEQYNSTYRVVSVLTVLHQDWLNGKEYKCKV |
| LALA, and M428L | SNKALPAPIEKTISKAKGQPREPQVYTLPPSRDELTKNQVSLWCLVKG |
| and N4345 mutations | FYPSDIAVLWESYGTEWASYKTTPPVLDSDGSFFLYSKLTVTKEEWQ |
| | QGFVFSCSVLHEALHSHYTQKSLSLSPGK (SEQ ID NO: 2454) |
| Clone CH3C.35.21.17.2 | APEAAGGPSVFLFPPKPKDTLMISRTPEVTCVVVDVSHEDPEVKFNWY |
| with knob, | VDGVEVHNAKTKPREEQYNSTYRVVSVLTVLHQDWLNGKEYKCKV |
| LALAPG, and | SNKALGAPIEKTISKAKGQPREPQVYTLPPSRDELTKNQVSLWCLVKG |
| M428L and N434S | FYPSDIAVLWESYGTEWASYKTTPPVLDSDGSFFLYSKLTVTKEEWQ |
| mutations | QGFVFSCSVLHEALHSHYTQKSLSLSPGK (SEQ ID NO: 2455) |
| Clone CH3C.35.21.17.2 | APELLGGPSVFLFPPKPKDTLMISRTPEVTCVVVDVSHEDPEVKFNWY |
| with hole and | VDGVEVHNAKTKPREEQYNSTYRVVSVLTVLHQDWLNGKEYKCKV |
| M428L and N4345 | SNKALPAPIEKTISKAKGQPREPQVYTLPPSRDELTKNQVSLSCAVKGF |
| mutations | YPSDIAVLWESYGTEWASYKTTPPVLDSDGSFFLVSKLTVTKEEWQQ |
| | GFVFSCSVLHEALHSHYTQKSLSLSPGK (SEQ ID NO: 2456) |
| Clone CH3C.35.21.17.2 | APEAAGGPSVFLFPPKPKDTLMISRTPEVTCVVVDVSHEDPEVKFNWY |
| with hole, | VDGVEVHNAKTKPREEQYNSTYRVVSVLTVLHQDWLNGKEYKCKV |
| LALA, and M428L | SNKALPAPIEKTISKAKGQPREPQVYTLPPSRDELTKNQVSLSCAVKGF |
| and N4345 mutations | YPSDIAVLWESYGTEWASYKTTPPVLDSDGSFFLVSKLTVTKEEWQQ |
| | GFVFSCSVLHEALHSHYTQKSLSLSPGK (SEQ ID NO: 2457) |
| Clone CH3C.35.21.17.2 | APEAAGGPSVFLFPPKPKDTLMISRTPEVTCVVVDVSHEDPEVKFNWY |
| with hole, | VDGVEVHNAKTKPREEQYNSTYRVVSVLTVLHQDWLNGKEYKCKV |
| LALAPG, and | SNKALGAPIEKTISKAKGQPREPQVYTLPPSRDELTKNQVSLSCAVKG |
| M428L and N434S | FYPSDIAVLWESYGTEWASYKTTPPVLDSDGSFFLVSKLTVTKEEWQ |
| mutations | QGFVFSCSVLHEALHSHYTQKSLSLSPGK (SEQ ID NO: 2458) |
| Clone CH3C.35.23 | APELLGGPSVFLFPPKPKDTLMISRTPEVTCVVVDVSHEDPEVKFNWY |
| with M428L and | VDGVEVHNAKTKPREEQYNSTYRVVSVLTVLHQDWLNGKEYKCKV |
| N434S mutations | SNKALPAPIEKTISKAKGQPREPQVYTLPPSRDELTKNQVSLTCLVKGF |
| | YPSDIAVEWESYGTEWSNYKTTPPVLDSDGSFFLYSKLTVTKEEWQQ |
| | GFVFSCSVLHEALHSHYTQKSLSLSPGK (SEQ ID NO: 2459) |
| Clone CH3C.35.23 | APELLGGPSVFLFPPKPKDTLMISRTPEVTCVVVDVSHEDPEVKFNWY |
| with knob and M428L | VDGVEVHNAKTKPREEQYNSTYRVVSVLTVLHQDWLNGKEYKCKV |
| and N434S mutations | SNKALPAPIEKTISKAKGQPREPQVYTLPPSRDELTKNQVSLWCLVKG |
| | FYPSDIAVEWESYGTEWSNYKTTPPVLDSDGSFFLYSKLTVTKEEWQ |
| | QGFVFSCSVLHEALHSHYTQKSLSLSPGK (SEQ ID NO: 2460) |
| Clone CH3C.35.23 | APEAAGGPSVFLFPPKPKDTLMISRTPEVTCVVVDVSHEDPEVKFNWY |
| with knob, LALA, | VDGVEVHNAKTKPREEQYNSTYRVVSVLTVLHQDWLNGKEYKCKV |
| and M428L and | SNKALPAPIEKTISKAKGQPREPQVYTLPPSRDELTKNQVSLWCLVKG |
| N434S mutations | FYPSDIAVEWESYGTEWSNYKTTPPVLDSDGSFFLYSKLTVTKEEWQ |
| | QGFVFSCSVLHEALHSHYTQKSLSLSPGK (SEQ ID NO: 2461) |
| Clone CH3C.35.23 | APEAAGGPSVFLFPPKPKDTLMISRTPEVTCVVVDVSHEDPEVKFNWY |
| with knob, LALAPG, | VDGVEVHNAKTKPREEQYNSTYRVVSVLTVLHQDWLNGKEYKCKV |
| and M428L and | SNKALGAPIEKTISKAKGQPREPQVYTLPPSRDELTKNQVSLWCLVKG |
| N434S mutations | FYPSDIAVEWESYGTEWSNYKTTPPVLDSDGSFFLYSKLTVTKEEWQ |
| | QGFVFSCSVLHEALHSHYTQKSLSLSPGK (SEQ ID NO: 2462) |
| Clone CH3C.35.23 | APELLGGPSVFLFPPKPKDTLMISRTPEVTCVVVDVSHEDPEVKFNWY |
| with hole and M428L | VDGVEVHNAKTKPREEQYNSTYRVVSVLTVLHQDWLNGKEYKCKV |
| and N4345 mutations | SNKALPAPIEKTISKAKGQPREPQVYTLPPSRDELTKNQVSLSCAVKGF |
| | YPSDIAVEWESYGTEWSNYKTTPPVLDSDGSFFLVSKLTVTKEEWQQ |
| | GFVFSCSVLHEALHSHYTQKSLSLSPGK (SEQ ID NO: 2463) |
| Clone CH3C.35.23 | APEAAGGPSVFLFPPKPKDTLMISRTPEVTCVVVDVSHEDPEVKFNWY |
| with hole. LALA, and | VDGVEVHNAKTKPREEQYNSTYRVVSVLTVLHQDWLNGKEYKCKV |
| M428L and N4345 | SNKALPAPIEKTISKAKGQPREPQVYTLPPSRDELTKNQVSLSCAVKGF |
| mutations | YPSDIAVEWESYGTEWSNYKTTPPVLDSDGSFFLVSKLTVTKEEWQQ |
| | GFVFSCSVLHEALHSHYTQKSLSLSPGK (SEQ ID NO: 2464) |
| Clone CH3C.35.23 | APEAAGGPSVFLFPPKPKDTLMISRTPEVTCVVVDVSHEDPEVKFNWY |
| with hole, LALAPG, | VDGVEVHNAKTKPREEQYNSTYRVVSVLTVLHQDWLNGKEYKCKV |
| and M428L and | SNKALGAPIEKTISKAKGQPREPQVYTLPPSRDELTKNQVSLSCAVKG |
| N434S mutations | FYPSDIAVEWESYGTEWSNYKTTPPVLDSDGSFFLVSKLTVTKEEWQ |
| | QGFVFSCSVLHEALHSHYTQKSLSLSPGK (SEQ ID NO: 2465) |
| Clone CH3C.35.23.1.1 | APELLGGPSVFLFPPKPKDTLMISRTPEVTCVVVDVSHEDPEVKFNWY |
| with M428L and | VDGVEVHNAKTKPREEQYNSTYRVVSVLTVLHQDWLNGKEYKCKV |
| N434S mutations | SNKALPAPIEKTISKAKGQPREPQVYTLPPSRDELTKNQVSLTCLVKGF |
| | YPSDIAVEWESFGTEWSNYKTTPPVLDSDGSFFLYSKLTVSKEEWQQG |
| | FVFSCSVLHEALHSHYTQKSLSLSPGK (SEQ ID NO: 2466) |
| Clone CH3C.35.23.1.1 | APELLGGPSVFLFPPKPKDTLMISRTPEVTCVVVDVSHEDPEVKFNWY |
| with knob and | VDGVEVHNAKTKPREEQYNSTYRVVSVLTVLHQDWLNGKEYKCKV |
| M428L and N4345 | SNKALPAPIEKTISKAKGQPREPQVYTLPPSRDELTKNQVSLWCLVKG |
| mutations | FYPSDIAVEWESFGTEWSNYKTTPPVLDSDGSFFLYSKLTVSKEEWQQ |
| | GFVFSCSVLHEALHSHYTQKSLSLSPGK (SEQ ID NO: 2467) |
| Clone CH3C.35.23.1.1 | APEAAGGPSVFLFPPKPKDTLMISRTPEVTCVVVDVSHEDPEVKFNWY |
| with knob, LALA, | VDGVEVHNAKTKPREEQYNSTYRVVSVLTVLHQDWLNGKEYKCKV |
| and M428L and | SNKALPAPIEKTISKAKGQPREPQVYTLPPSRDELTKNQVSLWCLVKG |
| N434S mutations | FYPSDIAVEWESFGTEWSNYKTTPPVLDSDGSFFLYSKLTVSKEEWQQ |
| | GFVFSCSVLHEALHSHYTQKSLSLSPGK (SEQ ID NO: 2468) |
| Clone CH3C.35.23.1.1 | APEAAGGPSVFLFPPKPKDTLMISRTPEVTCVVVDVSHEDPEVKFNWY |
| with knob, | VDGVEVHNAKTKPREEQYNSTYRVVSVLTVLHQDWLNGKEYKCKV |
| LALAPG, and | SNKALGAPIEKTISKAKGQPREPQVYTLPPSRDELTKNQVSLWCLVKG |
| M428L and N434S | FYPSDIAVEWESFGTEWSNYKTTPPVLDSDGSFFLYSKLTVSKEEWQQ |
| mutations | GFVFSCSVLHEALHSHYTQKSLSLSPGK (SEQ ID NO: 2469) |
| | APELLGGPSVFLFPPKPKDTLMISRTPEVTCVVVDVSHEDPEVKFNWY |
| Clone CH3C.35.23.1.1 | VDGVEVHNAKTKPREEQYNSTYRVVSVLTVLHQDWLNGKEYKCKV |
| with hole and | SNKALPAPIEKTISKAKGQPREPQVYTLPPSRDELTKNQVSLSCAVKGF |
| M428L and N434S | YPSDIAVEWESFGTEWSNYKTTPPVLDSDGSFFLVSKLTVSKEEWQQG |
| mutations | FVFSCSVLHEALHSHYTQKSLSLSPGK (SEQ ID NO: 2470) |
| Clone CH3C.35.23.1.1 | APEAAGGPSVFLFPPKPKDTLMISRTPEVTCVVVDVSHEDPEVKFNWY |
| with hole, LALA, | VDGVEVHNAKTKPREEQYNSTYRVVSVLTVLHQDWLNGKEYKCKV |
| and M428L and | SNKALPAPIEKTISKAKGQPREPQVYTLPPSRDELTKNQVSLSCAVKGF |
| N434S mutations | YPSDIAVEWESFGTEWSNYKTTPPVLDSDGSFFLVSKLTVSKEEWQQG |
| | FVFSCSVLHEALHSHYTQKSLSLSPGK (SEQ ID NO: 2471) |
| Clone CH3C.35.23.1.1 | APEAAGGPSVFLFPPKPKDTLMISRTPEVTCVVVDVSHEDPEVKFNWY |
| with hole, | VDGVEVHNAKTKPREEQYNSTYRVVSVLTVLHQDWLNGKEYKCKV |
| LALAPG, and | SNKALGAPIEKTISKAKGQPREPQVYTLPPSRDELTKNQVSLSCAVKG |
| M428L and N434S | FYPSDIAVEWESFGTEWSNYKTTPPVLDSDGSFFLVSKLTVSKEEWQQ |
| mutations | GFVFSCSVLHEALHSHYTQKSLSLSPGK (SEQ ID NO: 2472) |
| Clone CH3C.35.23.2 | APELLGGPSVFLFPPKPKDTLMISRTPEVTCVVVDVSHEDPEVKFNWY |
| with M428L and | VDGVEVHNAKTKPREEQYNSTYRVVSVLTVLHQDWLNGKEYKCKV |
| N434S mutations | SNKALPAPIEKTISKAKGQPREPQVYTLPPSRDELTKNQVSLTCLVKGF |
| | YPSDIAVEWESYGTEWANYKTTPPVLDSDGSFFLYSKLTVTKEEWQQ |
| | GFVFSCSVLHEALHSHYTQKSLSLSPGK (SEQ ID NO: 2473) |
| Clone CH3C.35.23.2 | APELLGGPSVFLFPPKPKDTLMISRTPEVTCVVVDVSHEDPEVKFNWY |
| with knob and M428L | VDGVEVHNAKTKPREEQYNSTYRVVSVLTVLHQDWLNGKEYKCKV |
| and N4345 mutations | SNKALPAPIEKTISKAKGQPREPQVYTLPPSRDELTKNQVSLWCLVKG |
| | FYPSDIAVEWESYGTEWANYKTTPPVLDSDGSFFLYSKLTVTKEEWQ |
| | QGFVFSCSVLHEALHSHYTQKSLSLSPGK (SEQ ID NO: 2474) |
| Clone CH3C.35.23.2 | APEAAGGPSVFLFPPKPKDTLMISRTPEVTCVVVDVSHEDPEVKFNWY |
| with knob, LALA, | VDGVEVHNAKTKPREEQYNSTYRVVSVLTVLHQDWLNGKEYKCKV |
| and M428L and | SNKALPAPIEKTISKAKGQPREPQVYTLPPSRDELTKNQVSLWCLVKG |
| N434S mutations | FYPSDIAVEWESYGTEWANYKTTPPVLDSDGSFFLYSKLTVTKEEWQ |
| | QGFVFSCSVLHEALHSHYTQKSLSLSPGK (SEQ ID NO: 2475) |
| Clone CH3C.35.23.2 | APEAAGGPSVFLFPPKPKDTLMISRTPEVTCVVVDVSHEDPEVKFNWY |
| with knob, LALAPG, | VDGVEVHNAKTKPREEQYNSTYRVVSVLTVLHQDWLNGKEYKCKV |
| and M428L and | SNKALGAPIEKTISKAKGQPREPQVYTLPPSRDELTKNQVSLWCLVKG |
| N434S mutations | FYPSDIAVEWESYGTEWANYKTTPPVLDSDGSFFLYSKLTVTKEEWQ |
| | QGFVFSCSVLHEALHSHYTQKSLSLSPGK (SEQ ID NO: 2476) |
| Clone CH3C.35.23.2 | APELLGGPSVFLFPPKPKDTLMISRTPEVTCVVVDVSHEDPEVKFNWY |
| with hole and M428L | VDGVEVHNAKTKPREEQYNSTYRVVSVLTVLHQDWLNGKEYKCKV |
| and N4345 mutations | SNKALPAPIEKTISKAKGQPREPQVYTLPPSRDELTKNQVSLSCAVKGF |
| | YPSDIAVEWESYGTEWANYKTTPPVLDSDGSFFLVSKLTVTKEEWQQ |
| | GFVFSCSVLHEALHSHYTQKSLSLSPGK (SEQ ID NO: 2477) |
| Clone CH3C.35.23.2 | APEAAGGPSVFLFPPKPKDTLMISRTPEVTCVVVDVSHEDPEVKFNWY |
| with hole. LALA, and | VDGVEVHNAKTKPREEQYNSTYRVVSVLTVLHQDWLNGKEYKCKV |
| M428L and N434S | SNKALPAPIEKTISKAKGQPREPQVYTLPPSRDELTKNQVSLSCAVKGF |
| mutations | YPSDIAVEWESYGTEWANYKTTPPVLDSDGSFFLVSKLTVTKEEWQQ |
| | GFVFSCSVLHEALHSHYTQKSLSLSPGK (SEQ ID NO: 2478) |
| Clone CH3C.35.23.2 | APEAAGGPSVFLFPPKPKDTLMISRTPEVTCVVVDVSHEDPEVKFNWY |
| with hole, LALAPG, | VDGVEVHNAKTKPREEQYNSTYRVVSVLTVLHQDWLNGKEYKCKV |
| and M428L and | SNKALGAPIEKTISKAKGQPREPQVYTLPPSRDELTKNQVSLSCAVKG |
| N434S mutations | FYPSDIAVEWESYGTEWANYKTTPPVLDSDGSFFLVSKLTVTKEEWQ |
| | QGFVFSCSVLHEALHSHYTQKSLSLSPGK (SEQ ID NO: 2479) |
| Clone | APELLGGPSVFLFPPKPKDTLMISRTPEVTCVVVDVSHEDPEVKFNWY |
| CH3C.35.23.2.1 with | VDGVEVHNAKTKPREEQYNSTYRVVSVLTVLHQDWLNGKEYKCKV |
| M428L and N4345 | SNKALPAPIEKTISKAKGQPREPQVYTLPPSRDELTKNQVSLTCLVKGF |
| mutations | YPSDIAVEWESYGTEWANYKTTPPVLDSDGSFFLYSKLTVSKSEWQQ |
| | GFVFSCSVLHEALHSHYTQKSLSLSPGK (SEQ ID NO: 2480) |
| Clone | APELLGGPSVFLFPPKPKDTLMISRTPEVTCVVVDVSHEDPEVKFNWY |
| CH3C.35.23.2.1 with | VDGVEVHNAKTKPREEQYNSTYRVVSVLTVLHQDWLNGKEYKCKV |
| knob and M428L and | SNKALPAPIEKTISKAKGQPREPQVYTLPPSRDELTKNQVSLWCLVKG |
| N434S mutations | FYPSDIAVEWESYGTEWANYKTTPPVLDSDGSFFLYSKLTVSKSEWQ |
| | QGFVFSCSVLHEALHSHYTQKSLSLSPGK (SEQ ID NO: 2481) |
| Clone | APEAAGGPSVFLFPPKPKDTLMISRTPEVTCVVVDVSHEDPEVKFNWY |
| CH3C.35.23.2.1 with | VDGVEVHNAKTKPREEQYNSTYRVVSVLTVLHQDWLNGKEYKCKV |
| knob, LALA, and | SNKALPAPIEKTISKAKGQPREPQVYTLPPSRDELTKNQVSLWCLVKG |
| M428L and N434 S | FYPSDIAVEWESYGTEWANYKTTPPVLDSDGSFFLYSKLTVSKSEWQ |
| mutations | QGFVFSCSVLHEALHSHYTQKSLSLSPGK (SEQ ID NO: 2482) |
| Clone | APEAAGGPSVFLFPPKPKDTLMISRTPEVTCVVVDVSHEDPEVKFNWY |
| CH3C.35.23.2.1 with | VDGVEVHNAKTKPREEQYNSTYRVVSVLTVLHQDWLNGKEYKCKV |
| knob, LALAPG, and | SNKALGAPIEKTISKAKGQPREPQVYTLPPSRDELTKNQVSLWCLVKG |
| M428L and N434S | FYPSDIAVEWESYGTEWANYKTTPPVLDSDGSFFLYSKLTVSKSEWQ |
| mutations | QGFVFSCSVLHEALHSHYTQKSLSLSPGK (SEQ ID NO: 2483) |
| Clone | APELLGGPSVFLFPPKPKDTLMISRTPEVTCVVVDVSHEDPEVKFNWY |
| CH3C.35.23.2.1 with | VDGVEVHNAKTKPREEQYNSTYRVVSVLTVLHQDWLNGKEYKCKV |
| hole and M428L and | SNKALPAPIEKTISKAKGQPREPQVYTLPPSRDELTKNQVSLSCAVKGF |
| N434S mutations | YPSDIAVEWESYGTEWANYKTTPPVLDSDGSFFLVSKLTVSKSEWQQ |
| | GFVFSCSVLHEALHSHYTQKSLSLSPGK (SEQ ID NO: 2484) |
| Clone | APEAAGGPSVFLFPPKPKDTLMISRTPEVTCVVVDVSHEDPEVKFNWY |
| CH3C.35.23.2.1 with | VDGVEVHNAKTKPREEQYNSTYRVVSVLTVLHQDWLNGKEYKCKV |
| hole, LALA, and | SNKALPAPIEKTISKAKGQPREPQVYTLPPSRDELTKNQVSLSCAVKGF |
| M428L and N434S | YPSDIAVEWESYGTEWANYKTTPPVLDSDGSFFLVSKLTVSKSEWQQ |
| mutations | GFVFSCSVLHEALHSHYTQKSLSLSPGK (SEQ ID NO: 2485) |
| Clone | APEAAGGPSVFLFPPKPKDTLMISRTPEVTCVVVDVSHEDPEVKFNWY |
| CH3C.35.23.2.1 with | VDGVEVHNAKTKPREEQYNSTYRVVSVLTVLHQDWLNGKEYKCKV |
| hole, LALAPG, and | SNKALGAPIEKTISKAKGQPREPQVYTLPPSRDELTKNQVSLSCAVKG |
| M428L and N434S | FYPSDIAVEWESYGTEWANYKTTPPVLDSDGSFFLVSKLTVSKSEWQ |
| mutations | QGFVFSCSVLHEALHSHYTQKSLSLSPGK (SEQ ID NO: 2486) |
| Clone CH3C.35.23.3 | APELLGGPSVFLFPPKPKDTLMISRTPEVTCVVVDVSHEDPEVKFNWY |
| with M428L and | VDGVEVHNAKTKPREEQYNSTYRVVSVLTVLHQDWLNGKEYKCKV |
| N434S mutations | SNKALPAPIEKTISKAKGQPREPQVYTLPPSRDELTKNQVSLTCLVKGF |
| | YPSDIAVEWESYGTEWVNYKTTPPVLDSDGSFFLYSKLTVTKEEWQQ |
| | GFVFSCSVLHEALHSHYTQKSLSLSPGK (SEQ ID NO: 2487) |
| Clone CH3C.35.23.3 | APELLGGPSVFLFPPKPKDTLMISRTPEVTCVVVDVSHEDPEVKFNWY |
| with knob and M428L | VDGVEVHNAKTKPREEQYNSTYRVVSVLTVLHQDWLNGKEYKCKV |
| and N4345 mutations | SNKALPAPIEKTISKAKGQPREPQVYTLPPSRDELTKNQVSLWCLVKG |
| | FYPSDIAVEWESYGTEWVNYKTTPPVLDSDGSFFLYSKLTVTKEEWQ |
| | QGFVFSCSVLHEALHSHYTQKSLSLSPGK (SEQ ID NO: 2488) |
| Clone CH3C.35.23.3 | APEAAGGPSVFLFPPKPKDTLMISRTPEVTCVVVDVSHEDPEVKFNWY |
| with knob, LALA, | VDGVEVHNAKTKPREEQYNSTYRVVSVLTVLHQDWLNGKEYKCKV |
| and M428L and | SNKALPAPIEKTISKAKGQPREPQVYTLPPSRDELTKNQVSLWCLVKG |
| N434S mutations | FYPSDIAVEWESYGTEWVNYKTTPPVLDSDGSFFLYSKLTVTKEEWQ |
| | QGFVFSCSVLHEALHSHYTQKSLSLSPGK (SEQ ID NO: 2489) |
| Clone CH3C.35.23.3 | APEAAGGPSVFLFPPKPKDTLMISRTPEVTCVVVDVSHEDPEVKFNWY |
| with knob, LALAPG, | VDGVEVHNAKTKPREEQYNSTYRVVSVLTVLHQDWLNGKEYKCKV |
| and M428L and | SNKALGAPIEKTISKAKGQPREPQVYTLPPSRDELTKNQVSLWCLVKG |
| N434S mutations | FYPSDIAVEWESYGTEWVNYKTTPPVLDSDGSFFLYSKLTVTKEEWQ |
| | QGFVFSCSVLHEALHSHYTQKSLSLSPGK (SEQ ID NO: 2490) |
| Clone CH3C.35.23.3 | APELLGGPSVFLFPPKPKDTLMISRTPEVTCVVVDVSHEDPEVKFNWY |
| with hole and M428L | VDGVEVHNAKTKPREEQYNSTYRVVSVLTVLHQDWLNGKEYKCKV |
| and N4345 mutations | SNKALPAPIEKTISKAKGQPREPQVYTLPPSRDELTKNQVSLSCAVKGF |
| | YPSDIAVEWESYGTEWVNYKTTPPVLDSDGSFFLVSKLTVTKEEWQQ |
| | GFVFSCSVLHEALHSHYTQKSLSLSPGK (SEQ ID NO: 2491) |
| Clone CH3C.35.23.3 | APEAAGGPSVFLFPPKPKDTLMISRTPEVTCVVVDVSHEDPEVKFNWY |
| with hole. LALA, and | VDGVEVHNAKTKPREEQYNSTYRVVSVLTVLHQDWLNGKEYKCKV |
| M428L and N4345 | SNKALPAPIEKTISKAKGQPREPQVYTLPPSRDELTKNQVSLSCAVKGF |
| mutations | YPSDIAVEWESYGTEWVNYKTTPPVLDSDGSFFLVSKLTVTKEEWQQ |
| | GFVFSCSVLHEALHSHYTQKSLSLSPGK (SEQ ID NO: 2492) |
| Clone CH3C.35.23.3 | APEAAGGPSVFLFPPKPKDTLMISRTPEVTCVVVDVSHEDPEVKFNWY |
| with hole, LALAPG, | VDGVEVHNAKTKPREEQYNSTYRVVSVLTVLHQDWLNGKEYKCKV |
| and M428L and | SNKALGAPIEKTISKAKGQPREPQVYTLPPSRDELTKNQVSLSCAVKG |
| N434S mutations | FYPSDIAVEWESYGTEWVNYKTTPPVLDSDGSFFLVSKLTVTKEEWQ |
| | QGFVFSCSVLHEALHSHYTQKSLSLSPGK (SEQ ID NO: 2493) |
| Clone CH3C.35.23.4 | APELLGGPSVFLFPPKPKDTLMISRTPEVTCVVVDVSHEDPEVKFNWY |
| with M428L and | VDGVEVHNAKTKPREEQYNSTYRVVSVLTVLHQDWLNGKEYKCKV |
| N434S mutations | SNKALPAPIEKTISKAKGQPREPQVYTLPPSRDELTKNQVSLTCLVKGF |
| | YPSDIAVEWESYGTEWSNYKTTPPVLDSDGSFFLYSKLTVSKEEWQQ |
| | GFVFSCSVLHEALHSHYTQKSLSLSPGK (SEQ ID NO: 2494) |
| Clone CH3C.35.23.4 | APELLGGPSVFLFPPKPKDTLMISRTPEVTCVVVDVSHEDPEVKFNWY |
| with knob and M428L | VDGVEVHNAKTKPREEQYNSTYRVVSVLTVLHQDWLNGKEYKCKV |
| and N4345 mutations | SNKALPAPIEKTISKAKGQPREPQVYTLPPSRDELTKNQVSLWCLVKG |
| | FYPSDIAVEWESYGTEWSNYKTTPPVLDSDGSFFLYSKLTVSKEEWQQ |
| | GFVFSCSVLHEALHSHYTQKSLSLSPGK (SEQ ID NO: 2495) |
| Clone CH3C.35.23.4 | APEAAGGPSVFLFPPKPKDTLMISRTPEVTCVVVDVSHEDPEVKFNWY |
| with knob, LALA, | VDGVEVHNAKTKPREEQYNSTYRVVSVLTVLHQDWLNGKEYKCKV |
| and M428L and | SNKALPAPIEKTISKAKGQPREPQVYTLPPSRDELTKNQVSLWCLVKG |
| N434S mutations | FYPSDIAVEWESYGTEWSNYKTTPPVLDSDGSFFLYSKLTVSKEEWQQ |
| | GFVFSCSVLHEALHSHYTQKSLSLSPGK (SEQ ID NO: 2496) |
| Clone CH3C.35.23.4 | APEAAGGPSVFLFPPKPKDTLMISRTPEVTCVVVDVSHEDPEVKFNWY |
| with knob, LALAPG, | VDGVEVHNAKTKPREEQYNSTYRVVSVLTVLHQDWLNGKEYKCKV |
| and M428L and | SNKALGAPIEKTISKAKGQPREPQVYTLPPSRDELTKNQVSLWCLVKG |
| N434S mutations | FYPSDIAVEWESYGTEWSNYKTTPPVLDSDGSFFLYSKLTVSKEEWQQ |
| | GFVFSCSVLHEALHSHYTQKSLSLSPGK (SEQ ID NO: 2497) |
| Clone CH3C.35.23.4 | APELLGGPSVFLFPPKPKDTLMISRTPEVTCVVVDVSHEDPEVKFNWY |
| with hole and M428L | VDGVEVHNAKTKPREEQYNSTYRVVSVLTVLHQDWLNGKEYKCKV |
| and N4345 mutations | SNKALPAPIEKTISKAKGQPREPQVYTLPPSRDELTKNQVSLSCAVKGF |
| | YPSDIAVEWESYGTEWSNYKTTPPVLDSDGSFFLVSKLTVSKEEWQQ |
| | GFVFSCSVLHEALHSHYTQKSLSLSPGK (SEQ ID NO: 2498) |
| Clone CH3C.35.23.4 | APEAAGGPSVFLFPPKPKDTLMISRTPEVTCVVVDVSHEDPEVKFNWY |
| with hole, LALA, and | VDGVEVHNAKTKPREEQYNSTYRVVSVLTVLHQDWLNGKEYKCKV |
| M428L and N4345 | SNKALPAPIEKTISKAKGQPREPQVYTLPPSRDELTKNQVSLSCAVKGF |
| mutations | YPSDIAVEWESYGTEWSNYKTTPPVLDSDGSFFLVSKLTVSKEEWQQ |
| | GFVFSCSVLHEALHSHYTQKSLSLSPGK (SEQ ID NO: 2499) |
| Clone CH3C.35.23.4 | APEAAGGPSVFLFPPKPKDTLMISRTPEVTCVVVDVSHEDPEVKFNWY |
| with hole, LALAPG, | VDGVEVHNAKTKPREEQYNSTYRVVSVLTVLHQDWLNGKEYKCKV |
| and M428L and | SNKALGAPIEKTISKAKGQPREPQVYTLPPSRDELTKNQVSLSCAVKG |
| N434S mutations | FYPSDIAVEWESYGTEWSNYKTTPPVLDSDGSFFLVSKLTVSKEEWQQ |
| | GFVFSCSVLHEALHSHYTQKSLSLSPGK (SEQ ID NO: 2500) |
| Fc sequence with hole | APELLGGPSVFLFPPKPKDTLMISRTPEVTCVVVDVSHEDPEVKFNWY |
| and M428L and | VDGVEVHNAKTKPREEQYNSTYRVVSVLTVLHQDWLNGKEYKCKV |
| N434S mutations | SNKALPAPIEKTISKAKGQPREPQVYTLPPSRDELTKNQVSLSCAVKGF |
| | YPSDIAVEWESNGQPENNYKTTPPVLDSDGSFFLVSKLTVDKSRWQQ |
| | GNVFSCSVLHEALHSHYTQKSLSLSPGK (SEQ ID NO: 2501) |
| Fc sequence with | APEAAGGPSVFLFPPKPKDTLMISRTPEVTCVVVDVSHEDPEVKFNWY |
| hole, LALA, and | VDGVEVHNAKTKPREEQYNSTYRVVSVLTVLHQDWLNGKEYKCKV |
| M428L and N4345 | SNKALPAPIEKTISKAKGQPREPQVYTLPPSRDELTKNQVSLSCAVKGF |
| mutations | YPSDIAVEWESNGQPENNYKTTPPVLDSDGSFFLVSKLTVDKSRWQQ |
| | GNVFSCSVLHEALHSHYTQKSLSLSPGK (SEQ ID NO: 2502) |
| Fc sequence with | APELLGGPSVFLFPPKPKDTLMISRTPEVTCVVVDVSHEDPEVKFNWY |
| knob and M428L and | VDGVEVHNAKTKPREEQYNSTYRVVSVLTVLHQDWLNGKEYKCKV |
| N434S mutations | SNKALPAPIEKTISKAKGQPREPQVYTLPPSRDELTKNQVSLWCLVKG |
| | FYPSDIAVEWESNGQPENNYKTTPPVLDSDGSFFLYSKLTVDKSRWQ |
| | QGNVFSCSVLHEALHSHYTQKSLSLSPGK (SEQ ID NO: 2503) |
| Fc sequence with | APEAAGGPSVFLFPPKPKDTLMISRTPEVTCVVVDVSHEDPEVKFNWY |
| knob, LALA, and | VDGVEVHNAKTKPREEQYNSTYRVVSVLTVLHQDWLNGKEYKCKV |
| M428L and N434S | SNKALPAPIEKTISKAKGQPREPQVYTLPPSRDELTKNQVSLWCLVKG |
| mutations | FYPSDIAVEWESNGQPENNYKTTPPVLDSDGSFFLYSKLTVDKSRWQ |
| | QGNVFSCSVLHEALHSHYTQKSLSLSPGK (SEQ ID NO: 2504) |
| SS2_NHis_TREM2 | MPALLSLVSLLSVLLMGCVAETGGSGHHHHHHSGTHNTTVFQGVAG |
| | QSLQVSCPYDSMIKHWGRRKAWCRQLGEKGPCQRVVSTHNLWLLSFL |
| | RRWNGSTAITDDTLGGTLTITLRNLQPHDAGLYQCQSLHGSEADTLR |
| | KVLVEVLADPLDHRDAGDLWFPGESESFEDAHVEHSISRSLLEGEIPFP |
| | PTSAS (SEQ ID NO: 2505) |

[0453] In some embodiments, each of the light chain variable regions and each of the heavy chain variable regions disclosed in in the above tables as well as specific combinations thereof and other embodiments of the anti-TREM2 antibody described in the '841 application and herein may be attached to the light chain constant regions (TABLE EN1) and heavy chain constant regions (TABLE EN2) to form complete antibody light and heavy chains, respectively, as further discussed below. Further, each of the generated heavy and light chain sequences may be combined to form a complete antibody structure. It should be understood that the heavy chain and light chain variable regions provided herein can also be attached to other constant domains having different sequences than the exemplary sequences listed herein.

[0454] H. PCT Patent Application Publication No. WO2019/118513A1

[0455] In some embodiments, the TREM2 agonist is an antibody or an antigen-binding fragment thereof, as described in PCT Patent Application Publication No. WO2019/118513A1 (“the '513 application”), which is incorporated by reference herein, in its entirety.

[0456] In some embodiments, the TREM2 binding agent comprises an antibody that comprises a light chain variable domain comprising a CDRL1, CDRL2, and CDRL3, and a heavy chain variable domain comprising a CDRH1, CDRH2, and CDRH3 disclosed in the '513 application specification. In some embodiments, the TREM2 binding agent comprises an antibody that comprises a light chain variable domain and a heavy chain variable domain disclosed in the '513 application specification.

[0457] In some embodiments, the antibody comprises a CDR-H1 comprising the sequence set forth in SEQ ID NO:2514, a CDR-H2 comprising the sequence set forth in SEQ ID NO:2515, a CDR-H3 comprising the sequence set forth in SEQ ID NO:11, a CDR-L1 comprising the sequence set forth in SEQ ID NO:2517, a CDR-L2 comprising the sequence set forth in SEQ ID NO:2518, and a CDR-L3 comprising the sequence set forth in SEQ ID NO:2519.

[0458] In some embodiments, the antibody is afucosylated and comprises the VH sequence shown in SEQ ID NO:2506; the VL sequence shown in SEQ ID NO:2507; and an active human IgG1 Fc region.

[0459] In some embodiments, the antibody comprises all 3 heavy chain CDRS of the sequence shown in SEQ ID NO:2512 and all 3 light chain CDRS of the sequence shown in SEQ ID NO:2513.

[0460] In some embodiments, the antibody comprises an A to T substitution at position 97 of the sequence shown in SEQ ID NO:2512; and a K to R substitution at position 98 of the sequence shown in SEQ ID NO:2512.

[0461] In some embodiments, the antibody comprises the VH sequence shown in SEQ ID NO:2506, 2508, or 2510.

[0462] In some embodiments, the antibody comprises the VH sequence shown in SEQ ID NO:2506, 2508, or 2510 and the VL sequence shown in SEQ ID NO:2507, 2509, or 2511. In some embodiments, the antibody comprises the VH sequence shown in SEQ ID NO:2506.

[0463] In some embodiments, the antibody comprises the VH sequence shown in SEQ ID NO:2506 and the VL sequence shown in SEQ ID NO:2507.

[0464] In some embodiments, the antibody is the 37012 antibody (see TABLE H1)

[0465] In some embodiments, the antibody is an antibody having a VL, VH, full heavy chain sequence or full light chain sequence disclosed in Table 1A or a CDR sequence as disclosed in Table 1B of PCT Patent Application Publication No. WO2019/118513A1, which are reproduced below as TABLES H1 and H2 respectively.

TABLE H1

| Name | Sequence |
|---|---|
| 37012 VH | EVQLLESGGGLVQPGGSLRLSCAASGFTFSNYYMAWVRQAPGKGLEW |
| | VSSLTNSGGSTYYADSVKGRFTISRDNSKNTLYLQMNSLRAEDTAVYY |
| | CTREWAGSGYFDYWGQGTLVTVSS (SEQ ID NO: 2506) |
| 37012 VL | DIQMTQSPSSLSASVGDRVTITCKASQNVGNNLAWYQQKPGKAPKLLIY |
| | YTSNRFTGVPSRFSGSGSGTDFTLTISSLQPEDFATYYCQRIYNSPWTFG |
| | QGTKLEIK (SEQ ID NO: 2507) |
| 37013VH | EVQLLESGGGLVQPGGSLRLSCAASGFTFSNYYMAWVRQAPGKGLEW |
| | VSSLTNSGGSTYYADSVKGRFTISRDNSKNTLYLQMNSLRAEDTAVYY |
| | CTREWAGSGYFDYWGQGTLVTVSS (SEQ ID NO: 2508) |
| 37013VL | DIQMTQSPSSLSASVGDRVTMTCKASQNVGNNLAWYQQKPGKAPKLL |
| | LYYTSNRFTGVPSRFSGSGSGTDFTLTISSVQPEDFATYYCQRIYNSPWT |
| | FGQGTKLELK (SEQ ID NO: 2509) |
| 37014VH | EVQLLESGGGLVQPGGSLRLSCAASGFTFSNYYMAWVRQAPGKGLEW |
| | VASLTNSGGSTYYADSVKGRFTLSRDNSKNTLYLQMNSLRAEDTAVYY |
| | CTREWAGSGYFDYWGQGTLVTVSS (SEQ ID NO: 2510) |
| 37014VL | DIQMTQSPSSLSASVGDRVTITCKASQNVGNNLAWYQQKPGKAPKLLIY |
| | YTSNRFTGVPSRFSGSGSGTDFTLTISSLQPEDFATYYCQRIYNSPWTFG |
| | QGTKLEIK (SEQ ID NO: 2511) |
| 37017VH | EVQLLESGGGLVQPGGSLRLSCAASGFTFSNYYMAWVRQAPGKGLEW |
| | VSSLTNSGGSTYYADSVKGRFTISRDNSKNTLYLQMNSLRAEDTAVYY |
| | CAKEWAGSGYFDYWGQGTLVTVSS (SEQ ID NO: 2512) |
| 37017VL | DIQMTQSPSSLSASVGDRVTITCKASQNVGNNLAWYQQKPGKAPKLLIY |
| | YTSNRFTGVPSRFSGSGSGTDFTLTISSLQPEDFATYYCQRIYNSPWTFG |
| | QGTKLEIK (SEQ ID NO: 2513) |
| Full 37012_H | EVQLLESGGGLVQPGGSLRLSCAASGFTFSNYYMAWVRQAPGKGLEW |
| | VSSLTNSGGSTYYADSVKGRFTISRDNSKNTLYLQMNSLRAEDTAVYY |
| | CTREWAGSGYFDYWGQGTLVTVSSASTKGPSVFPLAPSSKSTSGGTAA |
| | LGCLVKDYFPEPVTVSWNSGALTSGVHTFPAVLQSSGLYSLSSVVTVPS |
| | SSLGTQTYICNVNHKPSNTKVDKKVEPKSCDKTHTCPPCPAPELLGGPS |
| | VFLFPPKPKDTLMISRTPEVTCVVVDVSHEDPEVKFNWYVDGVEVHNA |
| | KTKPREEQYNSTYRVVSVLTVLHQDWLNGKEYKCKVSNKALPAPIEKT |
| | ISKAKGQPREPQVYTLPPSRDELTKNQVSLTCLVKGFYPSDIAVEWESN |
| | GQPENNYKTTPPVLDSDGSFFLYSKLTVDKSRWQQGNVFSCSVMHEAL |
| | HNHYTQKSLSLSPGK (SEQ ID NO: 2529) |
| Full 37012 L | DIQMTQSPSSLSASVGDRVTITCKASQNVGNNLAWYQQKPGKAPKLLIY |
| | YTSNRFTGVPSRFSGSGSGTDFTLTISSLQPEDFATYYCQRIYNSPWTFG |
| | QGTKLEIKRTVAAPSVFIFPPSDEQLKSGTASVVCLLNNFYPREAKVQW |
| | KVDNALQSGNSQESVTEQDSKDSTYSLSSTLTLSKADYEKHKVYACEV |
| | THQGLSSPVTKSFNRGEC (SEQ ID NO: 2530) |
| Full 37013_H | EVQLLESGGGLVQPGGSLRLSCAASGFTFSNYYMAWVRQAPGKGLEW |
| | VSSLTNSGGSTYYADSVKGRFTISRDNSKNTLYLQMNSLRAEDTAVYY |
| | CTREWAGSGYFDYWGQGTLVTVSSASTKGPSVFPLAPSSKSTSGGTAA |
| | LGCLVKDYFPEPVTVSWNSGALTSGVHTFPAVLQSSGLYSLSSVVTVPS |
| | SSLGTQTYICNVNHKPSNTKVDKKVEPKSCDKTHTCPPCPAPELLGGPS |
| | VFLFPPKPKDTLMISRTPEVTCVVVDVSHEDPEVKFNWYVDGVEVHNA |
| | KTKPREEQYNSTYRVVSVLTVLHQDWLNGKEYKCKVSNKALPAPIEKT |
| | ISKAKGQPREPQVYTLPPSRDELTKNQVSLTCLVKGFYPSDIAVEWESN |
| | GQPENNYKTTPPVLDSDGSFFLYSKLTVDKSRWQQGNVFSCSVMHEAL |
| | HNHYTQKSLSLSPGK (SEQ ID NO: 2531) |
| Full 37013 L | DIQMTQSPSSLSASVGDRVTMTCKASQNVGNNLAWYQQKPGKAPKLL |
| | LYYTSNRFTGVPSRFSGSGSGTDFTLTISSVQPEDFATYYCQRIYNSPWT |
| | FGQGTKLELKRTVAAPSVFIFPPSDEQLKSGTASVVCLLNNFYPREAKV |
| | QWKVDNALQSGNSQESVTEQDSKDSTYSLSSTLTLSKADYEKHKVYAC |
| | EVTHQGLSSPVTKSFNRGEC (SEQ ID NO: 2532) |
| Full 37017_H | EVQLLESGGGLVQPGGSLRLSCAASGFTFSNYYMAWVRQAPGKGLEW |
| | VASLTNSGGSTYYADSVKGRFTLSRDNSKNTLYLQMNSLRAEDTAVYY |
| | CTREWAGSGYFDYWGQGTLVTVSSASTKGPSVFPLAPSSKSTSGGTAA |
| | LGCLVKDYFPEPVTVSWNSGALTSGVHTFPAVLQSSGLYSLSSVVTVPS |
| | SSLGTQTYICNVNHKPSNTKVDKKVEPKSCDKTHTCPPCPAPELLGGPS |
| | VFLFPPKPKDTLMISRTPEVTCVVVDVSHEDPEVKFNWYVDGVEVHNA |
| | KTKPREEQYNSTYRVVSVLTVLHQDWLNGKEYKCKVSNKALPAPIEKT |
| | ISKAKGQPREPQVYTLPPSRDELTKNQVSLTCLVKGFYPSDIAVEWESN |
| | GQPENNYKTTPPVLDSDGSFFLYSKLTVDKSRWQQGNVFSCSVMHEAL |
| | HNHYTQKSLSLSPGK (SEQ ID NO: 2533) |
| Full 37017_L | DIQMTQSPSSLSASVGDRVTITCKASQNVGNNLAWYQQKPGKAPKLLIY |
| | YTSNRFTGVPSRFSGSGSGTDFTLTISSLQPEDFATYYCQRIYNSPWTFG |
| | QGTKLEIKRTVAAPSVFIFPPSDEQLKSGTASVVCLLNNFYPREAKVQW |
| | KVDNALQSGNSQESVTEQDSKDSTYSLSSTLTLSKADYEKHKVYACEV |
| | THQGLSSPVTKSFNRGEC (SEQ ID NO: 2534) |
| Full 37017_H | EVQLLESGGGLVQPGGSLRLSCAASGFTFSNYYMAWVRQAPGKGLEW |
| | VSSLTNSGGSTYYADSVKGRFTISRDNSKNTLYLQMNSLRAEDTAVYY |
| | CAKEWAGSGYFDYWGQGTLVTVSSASTKGPSVFPLAPSSKSTSGGTAA |
| | LGCLVKDYFPEPVTVSWNSGALTSGVHTFPAVLQSSGLYSLSSVVTVPS |
| | SSLGTQTYICNVNHKPSNTKVDKKVEPKSCDKTHTCPPCPAPELLGGPS |
| | VFLFPPKPKDTLMISRTPEVTCVVVDVSHEDPEVKFNWYVDGVEVHNA |
| | KTKPREEQYNSTYRVVSVLTVLHQDWLNGKEYKCKVSNKALPAPIEKT |
| | ISKAKGQPREPQVYTLPPSRDELTKNQVSLTCLVKGFYPSDIAVEWESN |
| | GQPENNYKTTPPVLDSDGSFFLYSKLTVDKSRWQQGNVFSCSVMHEAL |
| | HNHYTQKSLSLSPGK (SEQ ID NO: 2535) |
| Full 37017_L | DIQMTQSPSSLSASVGDRVTITCKASQNVGNNLAWYQQKPGKAPKLLIY |
| | YTSNRFTGVPSRFSGSGSGTDFTLTISSLQPEDFATYYCQRIYNSPWTFG |
| | QGTKLEIKRTVAAPSVFIFPPSDEQLKSGTASVVCLLNNFYPREAKVQW |
| | KVDNALQSGNSQESVTEQDSKDSTYSLSSTLTLSKADYEKHKVYACEV |
| | THQGLSSPVTKSFNRGEC (SEQ ID NO: 2536) |

TABLE H2
CDR's of humanized antibodies

| CDR | Sequence |
|---|---|
| CDR-H1 | FSNYYMA (SEQ ID NO: 2514) |
| CDR-H2 | SLTNSGGSTY (SEQ ID NO: 2515) |
| CDR-H3 | EWAGSGY (SEQ ID NO: 2516) |
| CDR-L1 | NVGNNLA (SEQ ID NO: 2517) |
| CDR-L2 | YTSNRFT (SEQ ID NO: 2518) |
| CDR-L3 | RIYNSPW (SEQ ID NO: 2519) |

[0466] In some embodiments, each of the light chain variable regions and each of the heavy chain variable regions disclosed in in the above tables as well as specific combinations thereof and other embodiments of the anti-TREM2 antibody described in the '513 application and herein may be attached to the light chain constant regions (TABLE EN1) and heavy chain constant regions (TABLE EN2) to form complete antibody light and heavy chains, respectively, as further discussed below. Further, each of the generated heavy and light chain sequences may be combined to form a complete antibody structure. It should be understood that the heavy chain and light chain variable regions provided herein can also be attached to other constant domains having different sequences than the exemplary sequences listed herein.

[0467] I. PCT Patent Application Publication No. WO2020/055975A1

[0468] In some embodiments, the TREM2 agonist is an antibody or an antigen-binding fragment thereof, as described in PCT Patent Application Publication No. WO2020/055975A1 (“the '975 application”), which is incorporated by reference herein, in its entirety.

[0469] In some embodiments, the TREM2 binding agent comprises an antibody that comprises a light chain variable domain comprising a CDRL1, CDRL2, and CDRL3, and a heavy chain variable domain comprising a CDRH1, CDRH2, and CDRH3 disclosed in the '975 application specification. In some embodiments, the TREM2 binding agent comprises an antibody that comprises a light chain variable domain and a heavy chain variable domain disclosed in the '975 application specification.

[0470] In some embodiments, the antibody comprises (a) a light chain variable region comprising an L1 derived from SEQ ID NO:2539, an L2 derived from SEQ ID NO:2539, an L3 derived from of SEQ ID NO:2539, or any combination thereof; and/or (b) a heavy chain variable region comprising an H1 derived from SEQ ID NO:2540, an H2 derived from SEQ ID NO:2540, an H3 derived from SEQ ID NO:2540, or any combination thereof.

[0471] In some embodiments, the antibody comprises (a) a light chain variable region comprising an L1 of SEQ ID NO:2541, an L2 comprising the amino acid sequence IVS, an L3 of SEQ ID NO:2542, or any combination thereof; and/or (b) a heavy chain variable region comprising an H1 comprising SEQ ID NO:2543, an H2 comprising SEQ ID NO:2544, an H3 comprising SEQ ID NO:2545, or any combination thereof.

[0472] In some embodiments, the antibody comprises (a) a light chain variable region comprising an L1 derived from SEQ ID NO:2546, an L2 derived from SEQ ID NO:2546, an L3 derived from of SEQ ID NO:2546, or any combination thereof; and/or (b) a heavy chain variable region comprising an H1 derived from SEQ ID NO:2547, an H2 derived from SEQ ID NO:2547, an H3 derived from of SEQ ID NO:2547, or any combination thereof.

[0473] In some embodiments, the antibody comprises (a) a light chain variable region comprising an L1 of SEQ ID NO:2548, an L2 comprising the amino acid sequence KVS, an L3 of SEQ ID NO:2549, or any combination thereof; and/or (b) a heavy chain variable region comprising an H1 comprising SEQ ID NO:2550, an H2 comprising SEQ ID NO:2551, an H3 comprising SEQ ID NO:2552, or any combination thereof.

[0474] In some embodiments, the antibody comprises (a) a light chain variable region comprising an L1 derived from SEQ ID NO:2553, an L2 derived from SEQ ID NO:2553, an L3 derived from of SEQ ID NO:2553, or any combination thereof; and/or (b) a heavy chain variable region comprising an H1 derived from SEQ ID NO:2554, an H2 derived from SEQ ID NO:2554, an H3 derived from of SEQ ID NO:2554, or any combination thereof.

[0475] In some embodiments, the antibody comprises (a) a light chain variable region comprising an L1 of SEQ ID NO:2555, an L2 comprising the amino acid sequence KVS, an L3 of SEQ ID NO:2556, or any combination thereof; and/or (b) a heavy chain variable region comprising an H1 comprising SEQ ID NO:2557, an H2 comprising SEQ ID NO:2558, an H3 comprising SEQ ID NO:2559, or any combination thereof.

[0476] In some embodiments, the antibody comprises (a) a light chain variable region comprising an L1 derived from SEQ ID NO:2560, an L2 derived from SEQ ID NO:2560, an L3 derived from of SEQ ID NO:2560, or any combination thereof; and/or (b) a heavy chain variable region comprising an H1 derived from SEQ ID NO:2561, an H2 derived from SEQ ID NO:2561, an H3 derived from of SEQ ID NO:2561, or any combination thereof.

[0477] In some embodiments, the antibody comprises (a) a light chain variable region comprising an L1 of SEQ ID NO:2562, an L2 comprising the amino acid sequence KVS, an L3 of SEQ ID NO:2563, or any combination thereof; and/or (b) a heavy chain variable region comprising an H1 comprising SEQ ID NO:2564, an H2 comprising SEQ ID NO:2565, an H3 comprising SEQ ID NO:2566, or any combination thereof.

[0478] In some embodiments, the antibody comprises (a) a light chain variable region comprising an L1 derived from SEQ ID NO:2567, an L2 derived from SEQ ID NO:2567, an L3 derived from of SEQ ID NO:2567, or any combination thereof; and/or (b) a heavy chain variable region comprising an H1 derived from SEQ ID NO:2568, an H2 derived from SEQ ID NO:2568, an H3 derived from of SEQ ID NO:2568, or any combination thereof. Compositions comprising the antibody, including but not limited to pharmaceutical compositions, are contemplated herein. In certain embodiments the antibody is a humanized antibody.

[0479] In some embodiments, the antibody comprises (a) a light chain variable region comprising an L1 of SEQ ID NO:2569, an L2 comprising the amino acid sequence KVS, an L3 of SEQ ID NO:2570, or any combination thereof; and/or (b) a heavy chain variable region comprising an H1 comprising SEQ ID NO:2571, an H2 comprising SEQ ID NO:2572, an H3 comprising SEQ ID NO:2573, or any combination thereof.

[0480] In some embodiments, the antibody comprises (a) a light chain variable region comprising an L1 derived from SEQ ID NO:2574, an L2 derived from SEQ ID NO:2574, an L3 derived from of SEQ ID NO:2574, or any combination thereof; and/or (b) a heavy chain variable region comprising an H1 derived from SEQ ID NO:2575, an H2 derived from SEQ ID NO:2575, an H3 derived from of SEQ ID NO:2575, or any combination thereof.

[0481] In some embodiments, the antibody comprises (a) a light chain variable region comprising an L1 of SEQ ID NO:2576, an L2 comprising the amino acid sequence WAS, an L3 of SEQ ID NO:2577, or any combination thereof; and/or (b) a heavy chain variable region comprising an H1 comprising SEQ ID NO:2578, an H2 comprising SEQ ID NO:2579, an H3 comprising SEQ ID NO:2580, or any combination thereof.

[0482] In some embodiments, the antibody is HJ23.4, HJ23.7, HJ23.8, HJ23.9, HJ23.10, or HJ23.13. In some embodiments, the antibody is a humanized antibody derived from HJ23.4, HJ23.7, HJ23.8, HJ23.9, HJ23.10, or HJ23.13. The accession number for the hybridoma that produced antibodies HJ23.4, HJ23.7, HJ23.8, HJ23.9, HJ23.10, and HJ23.13, and their respective light chain variable and heavy chain variable regions are noted in TABLE I1:

TABLE I1

| Antibody (ATCC # | Light chain | Heavy chain |
|---|---|---|
| of the hybridoma) | variable region | variable region |
| HJ23.4 (PTA-125168) | SEQ ID NO: 2539 | SEQ ID NO: 2540 |
| HJ23.7 (PTA-125169) | SEQ ID NO: 2546 | SEQ ID NO: 2547 |
| HJ23.8 (PTA-125170) | SEQ ID NO: 2552 | SEQ ID NO: 2553 |
| HJ23.9 (PTA-125171) | SEQ ID NO: 2561 | SEQ ID NO: 2562 |
| HJ23.10 (PTA-125172) | SEQ ID NO: 2567 | SEQ ID NO: 2568 |
| HJ23.13 (PTA-125173) | SEQ ID NO: 2574 | SEQ ID NO: 2575 |

[0483] In some embodiments, the antibody is an antibody disclosed in Tables A and B or the summary table appended to Example 2 of PCT Patent Application Publication No. WO2020/055975A1, reproduced below as TABLES 12-4.

TABLE I2

| | Light Chain HVR | | | Heavy Chain HVR | | |
|---|---|---|---|---|---|---|
| Antibody | Ll | L2 | L3 | H1 | H2 | H3 |
| 1 | SEQ ID NO: 2541 | | | | | |
| 2 | SEQ ID NO: 2541 | IVS | | | | |
| 3 | SEQ ID NO: 2541 | IVS | SEQ ID NO: 2542 | | | |
| 4 | | IVS | | | | |
| 5 | | IVS | SEQ ID NO: 2542 | | | |
| 6 | | | SEQ ID NO: 2542 | | | |
| 7 | SEQ ID NO: 2541 | | SEQ ID NO: 2542 | | | |
| 8 | | | | SEQ ID NO: 2543 | | |
| 9 | | | | SEQ ID NO: 2543 | SEQ ID NO: 2544 | |
| 10 | | | | SEQ ID NO: 2543 | SEQ ID NO: 2544 | SEQ ID NO: 2545 |
| 11 | | | | | SEQ ID NO: 2544 | |
| 12 | | | | | SEQ ID NO: 2544 | SEQ ID NO: 2545 |
| 13 | | | | | | SEQ ID NO: 2545 |
| 14 | | | | SEQ ID NO: 2543 | | SEQ ID NO: 2545 |
| 15 | SEQ ID NO: 2541 | | | SEQ ID NO: 2543 | | |
| 16 | SEQ ID NO: 2541 | | | SEQ ID NO: 2543 | SEQ ID NO: 2544 | |
| 17 | SEQ ID NO: 2541 | | | SEQ ID NO: 2543 | SEQ ID NO: 2544 | SEQ ID NO: 2545 |
| 18 | SEQ ID NO: 2541 | | | | SEQ ID NO: 2544 | |
| 19 | SEQ ID NO: 2541 | | | | SEQ ID NO: 2544 | SEQ ID NO: 2545 |
| 20 | SEQ ID NO: 2541 | | | | | SEQ ID NO: 2545 |
| 21 | SEQ ID NO: 2541 | | | SEQ ID NO: 2543 | | SEQ ID NO: 2545 |
| 22 | SEQ ID NO: 2541 | IVS | | SEQ ID NO: 2543 | | |
| 23 | SEQ ID NO: 2541 | IVS | | SEQ ID NO: 2543 | SEQ ID NO: 2544 | |
| 24 | SEQ ID NO: 2541 | IVS | | SEQ ID NO: 2543 | SEQ ID NO: 2544 | SEQ ID NO: 2545 |
| 25 | SEQ ID NO: 2541 | IVS | | | SEQ ID NO: 2544 | |
| 26 | SEQ ID NO: 2541 | IVS | | | SEQ ID NO: 2544 | SEQ ID NO: 2545 |
| 27 | SEQ ID NO: 2541 | IVS | | | | SEQ ID NO: 2545 |
| 28 | SEQ ID NO: 2541 | IVS | | SEQ ID NO: 2543 | | SEQ ID NO: 2545 |
| 29 | SEQ ID NO: 2541 | IVS | SEQ ID NO: 2542 | SEQ ID NO: 2543 | | |
| 30 | SEQ ID NO: 2541 | IVS | SEQ ID NO: 2542 | SEQ ID NO: 2543 | SEQ ID NO: 2544 | |
| 31 | SEQ ID NO: 2541 | IVS | SEQ ID NO: 2542 | SEQ ID NO: 2543 | SEQ ID NO: 2544 | SEQ ID NO: 2545 |
| 32 | SEQ ID NO: 2541 | IVS | SEQ ID NO: 2542 | | SEQ ID NO: 2544 | |
| 33 | SEQ ID NO: 2541 | IVS | SEQ ID NO: 2542 | | SEQ ID NO: 2544 | SEQ ID NO: 2545 |
| 34 | SEQ ID NO: 2541 | IVS | SEQ ID NO: 2542 | SEQ ID NO: 2543 | | SEQ ID NO: 2545 |
| 35 | SEQ ID NO: 2541 | IVS | SEQ ID NO: 2542 | | | SEQ ID NO: 2545 |
| 36 | | IVS | | SEQ ID NO: 2543 | | |
| 37 | | IVS | | SEQ ID NO: 2543 | SEQ ID NO: 2544 | |
| 38 | | IVS | | SEQ ID NO: 2543 | SEQ ID NO: 2544 | SEQ ID NO: 2545 |
| 39 | | IVS | | | SEQ ID NO: 2544 | |
| 40 | | IVS | | | SEQ ID NO: 2544 | SEQ ID NO: 2545 |
| 41 | | IVS | | | | SEQ ID NO: 2545 |
| 42 | | IVS | | SEQ ID NO: 2543 | | SEQ ID NO: 2545 |
| 43 | | IVS | SEQ ID NO: 2542 | SEQ ID NO: 2543 | | |
| 44 | | IVS | SEQ ID NO: 2542 | SEQ ID NO: 2543 | SEQ ID NO: 2544 | |
| 45 | | IVS | SEQ ID NO: 2542 | SEQ ID NO: 2543 | SEQ ID NO: 2544 | SEQ ID NO: 2545 |
| 46 | | IVS | SEQ ID NO: 2542 | | SEQ ID NO: 2544 | |
| 47 | | IVS | SEQ ID NO: 2542 | | SEQ ID NO: 2544 | SEQ ID NO: 2545 |
| 48 | | IVS | SEQ ID NO: 2542 | | | SEQ ID NO: 2545 |
| 49 | | IVS | SEQ ID NO: 2542 | SEQ ID NO: 2543 | | SEQ ID NO: 2545 |
| 50 | | | SEQ ID NO: 2542 | SEQ ID NO: 2543 | | |
| 51 | | | SEQ ID NO: 2542 | SEQ ID NO: 2543 | SEQ ID NO: 2544 | |
| 52 | | | SEQ ID NO: 2542 | SEQ ID NO: 2543 | SEQ ID NO: 2544 | SEQ ID NO: 2545 |
| 53 | | | SEQ ID NO: 2542 | | SEQ ID NO: 2544 | |
| 54 | | | SEQ ID NO: 2542 | | SEQ ID NO: 2544 | SEQ ID NO: 2545 |
| 55 | | | SEQ ID NO: 2542 | | | SEQ ID NO: 2545 |
| 56 | | | SEQ ID NO: 2542 | SEQ ID NO: 2543 | | SEQ ID NO: 2545 |
| 57 | SEQ ID NO: 2541 | | SEQ ID NO: 2542 | SEQ ID NO: 2543 | | |
| 58 | SEQ ID NO: 2541 | | SEQ ID NO: 2542 | SEQ ID NO: 2543 | SEQ ID NO: 2544 | |
| 59 | SEQ ID NO: 2541 | | SEQ ID NO: 2542 | SEQ ID NO: 2543 | SEQ ID NO: 2544 | SEQ ID NO: 2545 |
| 60 | SEQ ID NO: 2541 | | SEQ ID NO: 2542 | | SEQ ID NO: 2544 | |
| 61 | SEQ ID NO: 2541 | | SEQ ID NO: 2542 | | SEQ ID NO: 2544 | SEQ ID NO: 2545 |
| 62 | SEQ ID NO: 2541 | | SEQ ID NO: 2542 | | | SEQ ID NO: 2545 |
| 63 | SEQ ID NO: 2541 | | SEQ ID NO: 2542 | SEQ ID NO: 2543 | | SEQ ID NO: 2545 |
| 64 | SEQ ID NO: 2548 | | | | | |
| 65 | SEQ ID NO: 2548 | KVS | | | | |
| 66 | SEQ ID NO: 2548 | KVS | SEQ ID NO: 2549 | | | |
| 67 | | KVS | | | | |
| 68 | | KVS | SEQ ID NO: 2549 | | | |
| 69 | | | SEQ ID NO: 2549 | | | |
| 70 | SEQ ID NO: 2548 | | SEQ ID NO: 2549 | | | |
| 71 | | | | SEQ ID NO: 2550 | | |
| 72 | | | | SEQ ID NO: 2550 | SEQ ID NO: 2551 | |
| 73 | | | | SEQ ID NO: 2550 | SEQ ID NO: 2551 | SEQ ID NO: 2552 |
| 74 | | | | | SEQ ID NO: 2551 | |
| 75 | | | | | SEQ ID NO: 2551 | SEQ ID NO: 2552 |
| 76 | | | | | | SEQ ID NO: 2552 |
| 77 | | | | SEQ ID NO: 2550 | | SEQ ID NO: 2552 |
| 78 | SEQ ID NO: 2548 | | | SEQ ID NO: 2550 | | |
| 79 | SEQ ID NO: 2548 | | | SEQ ID NO: 2550 | SEQ ID NO: 2551 | |
| 80 | SEQ ID NO: 2548 | | | SEQ ID NO: 2550 | SEQ ID NO: 2551 | SEQ ID NO: 2552 |
| 81 | SEQ ID NO: 2548 | | | | SEQ ID NO: 2551 | |
| 82 | SEQ ID NO: 2548 | | | | SEQ ID NO: 2551 | SEQ ID NO: 2552 |
| 83 | SEQ ID NO: 2548 | | | | | SEQ ID NO: 2552 |
| 84 | SEQ ID NO: 2548 | | | SEQ ID NO: 2550 | | SEQ ID NO: 2552 |
| 85 | SEQ ID NO: 2548 | KVS | | SEQ ID NO: 2550 | | |
| 86 | SEQ ID NO: 2548 | KVS | | SEQ ID NO: 2550 | SEQ ID NO: 2551 | |
| 87 | SEQ ID NO: 2548 | KVS | | SEQ ID NO: 2550 | SEQ ID NO: 2551 | SEQ ID NO: 2552 |
| 88 | SEQ ID NO: 2548 | KVS | | | SEQ ID NO: 2551 | |
| 89 | SEQ ID NO: 2548 | KVS | | | SEQ ID NO: 2551 | SEQ ID NO: 2552 |
| 90 | SEQ ID NO: 2548 | KVS | | | | SEQ ID NO: 2552 |
| 91 | SEQ ID NO: 2548 | KVS | | SEQ ID NO: 2550 | | SEQ ID NO: 2552 |
| 92 | SEQ ID NO: 2548 | KVS | SEQ ID NO: 2549 | SEQ ID NO: 2550 | | |
| 93 | SEQ ID NO: 2548 | KVS | SEQ ID NO: 2549 | SEQ ID NO: 2550 | SEQ ID NO: 2551 | |
| 94 | SEQ ID NO: 2548 | KVS | SEQ ID NO: 2549 | SEQ ID NO: 2550 | SEQ ID NO: 2551 | SEQ ID NO: 2552 |
| 95 | SEQ ID NO: 2548 | KVS | SEQ ID NO: 2549 | | SEQ ID NO: 2551 | |
| 96 | SEQ ID NO: 2548 | KVS | SEQ ID NO: 2549 | | SEQ ID NO: 2551 | SEQ ID NO: 2552 |
| 97 | SEQ ID NO: 2548 | KVS | SEQ ID NO: 2549 | | | SEQ ID NO: 2552 |
| 98 | SEQ ID NO: 2548 | KVS | SEQ ID NO: 2549 | SEQ ID NO: 2550 | | SEQ ID NO: 2552 |
| 99 | | KVS | | SEQ ID NO: 2550 | | |
| 100 | | KVS | | SEQ ID NO: 2550 | SEQ ID NO: 2551 | |
| 101 | | KVS | | SEQ ID NO: 2550 | SEQ ID NO: 2551 | SEQ ID NO: 2552 |
| 102 | | KVS | | | SEQ ID NO: 2551 | |
| 103 | | KVS | | | SEQ ID NO: 2551 | SEQ ID NO: 2552 |
| 104 | | KVS | | | | SEQ ID NO: 2552 |
| 105 | | KVS | | SEQ ID NO: 2550 | | SEQ ID NO: 2552 |
| 106 | | KVS | SEQ ID NO: 2549 | SEQ ID NO: 2550 | | |
| 107 | | KVS | SEQ ID NO: 2549 | SEQ ID NO: 2550 | SEQ ID NO: 2551 | |
| 108 | | KVS | SEQ ID NO: 2549 | SEQ ID NO: 2550 | SEQ ID NO: 2551 | SEQ ID NO: 2552 |
| 109 | | KVS | SEQ ID NO: 2549 | | SEQ ID NO: 2551 | |
| 110 | | KVS | SEQ ID NO: 2549 | | SEQ ID NO: 2551 | SEQ ID NO: 2552 |
| 111 | | KVS | SEQ ID NO: 2549 | | | SEQ ID NO: 2552 |
| 112 | | KVS | SEQ ID NO: 2549 | SEQ ID NO: 2550 | | SEQ ID NO: 2552 |
| 113 | | | SEQ ID NO: 2549 | SEQ ID NO: 2550 | | |
| 114 | | | SEQ ID NO: 2549 | SEQ ID NO: 2550 | SEQ ID NO: 2551 | |
| 115 | | | SEQ ID NO: 2549 | SEQ ID NO: 2550 | SEQ ID NO: 2551 | SEQ ID NO: 2552 |
| 116 | | | SEQ ID NO: 2549 | | SEQ ID NO: 2551 | |
| 117 | | | SEQ ID NO: 2549 | | SEQ ID NO: 2551 | SEQ ID NO: 2552 |
| 118 | | | SEQ ID NO: 2549 | | | SEQ ID NO: 2552 |
| 119 | | | SEQ ID NO: 2549 | SEQ ID NO: 2550 | | SEQ ID NO: 2552 |
| 120 | SEQ ID NO: 2548 | | SEQ ID NO: 2549 | SEQ ID NO: 2550 | | |
| 121 | SEQ ID NO: 2548 | | SEQ ID NO: 2549 | SEQ ID NO: 2550 | SEQ ID NO: 2551 | |
| 122 | SEQ ID NO: 2548 | | SEQ ID NO: 2549 | SEQ ID NO: 2550 | SEQ ID NO: 2551 | SEQ ID NO: 2552 |
| 123 | SEQ ID NO: 2548 | | SEQ ID NO: 2549 | | SEQ ID NO: 2551 | |
| 124 | SEQ ID NO: 2548 | | SEQ ID NO: 2549 | | SEQ ID NO: 2551 | SEQ ID NO: 2552 |
| 125 | SEQ ID NO: 2548 | | SEQ ID NO: 2549 | | | SEQ ID NO: 2552 |
| 126 | SEQ ID NO: 2548 | | SEQ ID NO: 2549 | SEQ ID NO: 2550 | | SEQ ID NO: 2552 |
| 127 | SEQ ID NO: 2555 | | | | | |
| 128 | SEQ ID NO: 2555 | KVS | | | | |
| 129 | SEQ ID NO: 2555 | KVS | SEQ ID NO: 2556 | | | |
| 130 | | KVS | | | | |
| 131 | | KVS | SEQ ID NO: 2556 | | | |
| 132 | | | SEQ ID NO: 2556 | | | |
| 133 | SEQ ID NO: 2555 | | SEQ ID NO: 2556 | | | |
| 134 | | | | SEQ ID NO: 2557 | | |
| 135 | | | | SEQ ID NO: 2557 | SEQ ID NO: 2558 | |
| 136 | | | | SEQ ID NO: 2557 | SEQ ID NO: 2558 | SEQ ID NO: 2559 |
| 137 | | | | | SEQ ID NO: 2558 | |
| 138 | | | | | SEQ ID NO: 2558 | SEQ ID NO: 2559 |
| 139 | | | | | | SEQ ID NO: 2559 |
| 140 | | | | SEQ ID NO: 2557 | | SEQ ID NO: 2559 |
| 141 | SEQ ID NO: 2555 | | | SEQ ID NO: 2557 | | |
| 142 | SEQ ID NO: 2555 | | | SEQ ID NO: 2557 | SEQ ID NO: 2558 | |
| 143 | SEQ ID NO: 2555 | | | SEQ ID NO: 2557 | SEQ ID NO: 2558 | SEQ ID NO: 2559 |
| 144 | SEQ ID NO: 2555 | | | | SEQ ID NO: 2558 | |
| 145 | SEQ ID NO: 2555 | | | | SEQ ID NO: 2558 | SEQ ID NO: 2559 |
| 146 | SEQ ID NO: 2555 | | | | | SEQ ID NO: 2559 |
| 147 | SEQ ID NO: 2555 | | | SEQ ID NO: 2557 | | SEQ ID NO: 2559 |
| 148 | SEQ ID NO: 2555 | KVS | | SEQ ID NO: 2557 | | |
| 149 | SEQ ID NO: 2555 | KVS | | SEQ ID NO: 2557 | SEQ ID NO: 2558 | |
| 150 | SEQ ID NO: 2555 | KVS | | SEQ ID NO: 2557 | SEQ ID NO: 2558 | SEQ ID NO: 2559 |
| 151 | SEQ ID NO: 2555 | KVS | | | SEQ ID NO: 2558 | |
| 152 | SEQ ID NO: 2555 | KVS | | | SEQ ID NO: 2558 | SEQ ID NO: 2559 |
| 153 | SEQ ID NO: 2555 | KVS | | | | SEQ ID NO: 2559 |
| 154 | SEQ ID NO: 2555 | KVS | | SEQ ID NO: 2557 | | SEQ ID NO: 2559 |
| 155 | SEQ ID NO: 2555 | KVS | SEQ ID NO: 2556 | SEQ ID NO: 2557 | | |
| 156 | SEQ ID NO: 2555 | KVS | SEQ ID NO: 2556 | SEQ ID NO: 2557 | SEQ ID NO: 2558 | |
| 157 | SEQ ID NO: 2555 | KVS | SEQ ID NO: 2556 | SEQ ID NO: 2557 | SEQ ID NO: 2558 | SEQ ID NO: 2559 |
| 158 | SEQ ID NO: 2555 | KVS | SEQ ID NO: 2556 | | SEQ ID NO: 2558 | |
| 159 | SEQ ID NO: 2555 | KVS | SEQ ID NO: 2556 | | SEQ ID NO: 2558 | SEQ ID NO: 2559 |
| 160 | SEQ ID NO: 2555 | KVS | SEQ ID NO: 2556 | SEQ ID NO: 2557 | | SEQ ID NO: 2559 |
| 161 | SEQ ID NO: 2555 | KVS | SEQ ID NO: 2556 | | | SEQ ID NO: 2559 |
| 162 | | KVS | | SEQ ID NO: 2557 | | |
| 163 | | KVS | | SEQ ID NO: 2557 | SEQ ID NO: 2558 | |
| 164 | | KVS | | SEQ ID NO: 2557 | SEQ ID NO: 2558 | SEQ ID NO: 2559 |
| 165 | | KVS | | | SEQ ID NO: 2558 | |
| 166 | | KVS | | | SEQ ID NO: 2558 | SEQ ID NO: 2559 |
| 167 | | KVS | | | | SEQ ID NO: 2559 |
| 168 | | KVS | | SEQ ID NO: 2557 | | SEQ ID NO: 2559 |
| 169 | | KVS | SEQ ID NO: 2556 | SEQ ID NO: 2557 | | |
| 170 | | KVS | SEQ ID NO: 2556 | SEQ ID NO: 2557 | SEQ ID NO: 2558 | |
| 171 | | KVS | SEQ ID NO: 2556 | SEQ ID NO: 2557 | SEQ ID NO: 2558 | SEQ ID NO: 2559 |
| 172 | | KVS | SEQ ID NO: 2556 | | SEQ ID NO: 2558 | |
| 173 | | KVS | SEQ ID NO: 2556 | | SEQ ID NO: 2558 | SEQ ID NO: 2559 |
| 174 | | KVS | SEQ ID NO: 2556 | | | SEQ ID NO: 2559 |
| 175 | | KVS | SEQ ID NO: 2556 | SEQ ID NO: 2557 | | SEQ ID NO: 2559 |
| 176 | | | SEQ ID NO: 2556 | SEQ ID NO: 2557 | | |
| 177 | | | SEQ ID NO: 2556 | SEQ ID NO: 2557 | SEQ ID NO: 2558 | |
| 178 | | | SEQ ID NO: 2556 | SEQ ID NO: 2557 | SEQ ID NO: 2558 | SEQ ID NO: 2559 |
| 179 | | | SEQ ID NO: 2556 | | SEQ ID NO: 2558 | |
| 180 | | | SEQ ID NO: 2556 | | SEQ ID NO: 2558 | SEQ ID NO: 2559 |
| 181 | | | SEQ ID NO: 2556 | | | SEQ ID NO: 2559 |
| 182 | | | SEQ ID NO: 2556 | SEQ ID NO: 2557 | | SEQ ID NO: 2559 |
| 183 | SEQ ID NO: 2555 | | SEQ ID NO: 2556 | SEQ ID NO: 2557 | | |
| 184 | SEQ ID NO: 2555 | | SEQ ID NO: 2556 | SEQ ID NO: 2557 | SEQ ID NO: 2558 | |
| 185 | SEQ ID NO: 2555 | | SEQ ID NO: 2556 | SEQ ID NO: 2557 | SEQ ID NO: 2558 | SEQ ID NO: 2559 |
| 186 | SEQ ID NO: 2555 | | SEQ ID NO: 2556 | | SEQ ID NO: 2558 | |
| 187 | SEQ ID NO: 2555 | | SEQ ID NO: 2556 | | SEQ ID NO: 2558 | SEQ ID NO: 2559 |
| 188 | SEQ ID NO: 2555 | | SEQ ID NO: 2556 | | | SEQ ID NO: 2559 |
| 189 | SEQ ID NO: 2555 | | SEQ ID NO: 2556 | SEQ ID NO: 2557 | | SEQ ID NO: 2559 |
| 190 | SEQ ID NO: 2562 | | | | | |
| 191 | SEQ ID NO: 2562 | KVS | | | | |
| 192 | SEQ ID NO: 2562 | KVS | SEQ ID NO: 25 | | | |
| 193 | | KVS | | | | |
| 194 | | KVS | SEQ ID NO: 25 | | | |
| 195 | | | SEQ ID NO: 25 | | | |
| 196 | SEQ ID NO: 2562 | | SEQ ID NO: 25 | | | |
| 197 | | | | SEQ ID NO: 2564 | | |
| 198 | | | | SEQ ID NO: 2564 | SEQ ID NO: 2565 | |
| 199 | | | | SEQ ID NO: 2564 | SEQ ID NO: 2565 | SEQ ID NO: 2566 |
| 200 | | | | | SEQ ID NO: 2565 | |
| 201 | | | | | SEQ ID NO: 2565 | SEQ ID NO: 2566 |
| 202 | | | | | | SEQ ID NO: 2566 |
| 203 | | | | SEQ ID NO: 2564 | | SEQ ID NO: 2566 |
| 204 | SEQ ID NO: 2562 | | | SEQ ID NO: 2564 | | |
| 205 | SEQ ID NO: 2562 | | | SEQ ID NO: 2564 | SEQ ID NO: 2565 | |
| 206 | SEQ ID NO: 2562 | | | SEQ ID NO: 2564 | SEQ ID NO: 2565 | SEQ ID NO: 2566 |
| 207 | SEQ ID NO: 2562 | | | | SEQ ID NO: 2565 | |
| 208 | SEQ ID NO: 2562 | | | | SEQ ID NO: 2565 | SEQ ID NO: 2566 |
| 209 | SEQ ID NO: 2562 | | | | | SEQ ID NO: 2566 |
| 210 | SEQ ID NO: 2562 | | | SEQ ID NO: 2564 | | SEQ ID NO: 2566 |
| 211 | SEQ ID NO: 2562 | KVS | | SEQ ID NO: 2564 | | |
| 212 | SEQ ID NO: 2562 | KVS | | SEQ ID NO: 2564 | SEQ ID NO: 2565 | |
| 213 | SEQ ID NO: 2562 | KVS | | SEQ ID NO: 2564 | SEQ ID NO: 2565 | SEQ ID NO: 2566 |
| 214 | SEQ ID NO: 2562 | KVS | | | SEQ ID NO: 2565 | |
| 215 | SEQ ID NO: 2562 | KVS | | | SEQ ID NO: 2565 | SEQ ID NO: 2566 |
| 216 | SEQ ID NO: 2562 | KVS | | | | SEQ ID NO: 2566 |
| 217 | SEQ ID NO: 2562 | KVS | | SEQ ID NO: 2564 | | SEQ ID NO: 2566 |
| 218 | SEQ ID NO: 2562 | KVS | SEQ ID NO: 25 | SEQ ID NO: 2564 | | |
| 219 | SEQ ID NO: 2562 | KVS | SEQ ID NO: 25 | SEQ ID NO: 2564 | SEQ ID NO: 2565 | |
| 220 | SEQ ID NO: 2562 | KVS | SEQ ID NO: 25 | SEQ ID NO: 2564 | SEQ ID NO: 2565 | SEQ ID NO: 2566 |
| 221 | SEQ ID NO: 2562 | KVS | SEQ ID NO: 25 | | SEQ ID NO: 2565 | |
| 222 | SEQ ID NO: 2562 | KVS | SEQ ID NO: 25 | | SEQ ID NO: 2565 | SEQ ID NO: 2566 |
| 223 | SEQ ID NO: 2562 | KVS | SEQ ID NO: 25 | SEQ ID NO: 2564 | | SEQ ID NO: 2566 |
| 224 | SEQ ID NO: 2562 | KVS | SEQ ID NO: 25 | | | SEQ ID NO: 2566 |
| 225 | | KVS | | SEQ ID NO: 2564 | | |
| 226 | | KVS | | SEQ ID NO: 2564 | SEQ ID NO: 2565 | |
| 227 | | KVS | | SEQ ID NO: 2564 | SEQ ID NO: 2565 | SEQ ID NO: 2566 |
| 228 | | KVS | | | SEQ ID NO: 2565 | |
| 229 | | KVS | | | SEQ ID NO: 2565 | SEQ ID NO: 2566 |
| 230 | | KVS | | | | SEQ ID NO: 2566 |
| 231 | | KVS | | SEQ ID NO: 2564 | | SEQ ID NO: 2566 |
| 232 | | KVS | SEQ ID NO: 25 | SEQ ID NO: 2564 | | |
| 233 | | KVS | SEQ ID NO: 25 | SEQ ID NO: 2564 | SEQ ID NO: 2565 | |
| 234 | | KVS | SEQ ID NO: 25 | SEQ ID NO: 2564 | SEQ ID NO: 2565 | SEQ ID NO: 2566 |
| 235 | | KVS | SEQ ID NO: 25 | | SEQ ID NO: 2565 | |
| 236 | | KVS | SEQ ID NO: 25 | | SEQ ID NO: 2565 | SEQ ID NO: 2566 |
| 237 | | KVS | SEQ ID NO: 25 | | | SEQ ID NO: 2566 |
| 238 | | KVS | SEQ ID NO: 25 | SEQ ID NO: 2564 | | SEQ ID NO: 2566 |
| 239 | | | SEQ ID NO: 25 | SEQ ID NO: 2564 | | |
| 240 | | | SEQ ID NO: 25 | SEQ ID NO: 2564 | SEQ ID NO: 2565 | |
| 241 | | | SEQ ID NO: 25 | SEQ ID NO: 2564 | SEQ ID NO: 2565 | SEQ ID NO: 2566 |
| 242 | | | SEQ ID NO: 25 | | SEQ ID NO: 2565 | |
| 243 | | | SEQ ID NO: 25 | | SEQ ID NO: 2565 | SEQ ID NO: 2566 |
| 244 | | | SEQ ID NO: 25 | | | SEQ ID NO: 2566 |
| 245 | | | SEQ ID NO: 25 | SEQ ID NO: 2564 | | SEQ ID NO: 2566 |
| 246 | SEQ ID NO: 2562 | | SEQ ID NO: 25 | SEQ ID NO: 2564 | | |
| 247 | SEQ ID NO: 2562 | | SEQ ID NO: 25 | SEQ ID NO: 2564 | SEQ ID NO: 2565 | |
| 248 | SEQ ID NO: 2562 | | SEQ ID NO: 25 | SEQ ID NO: 2564 | SEQ ID NO: 2565 | SEQ ID NO: 2566 |
| 249 | SEQ ID NO: 2562 | | SEQ ID NO: 25 | | SEQ ID NO: 2565 | |
| 250 | SEQ ID NO: 2562 | | SEQ ID NO: 25 | | SEQ ID NO: 2565 | SEQ ID NO: 2566 |
| 251 | SEQ ID NO: 2562 | | SEQ ID NO: 25 | | | SEQ ID NO: 2566 |
| 252 | SEQ ID NO: 2562 | | SEQ ID NO: 25 | SEQ ID NO: 2564 | | SEQ ID NO: 2566 |
| 253 | SEQ ID NO: 2569 | | | | | |
| 254 | SEQ ID NO: 2569 | KVS | | | | |
| 255 | SEQ ID NO: 2569 | KVS | SEQ ID NO: 2570 | | | |
| 256 | | KVS | | | | |
| 257 | | KVS | SEQ ID NO: 2570 | | | |
| 258 | | | SEQ ID NO: 2570 | | | |
| 259 | SEQ ID NO: 2569 | | SEQ ID NO: 2570 | | | |
| 260 | | | | SEQ ID NO: 2571 | | |
| 261 | | | | SEQ ID NO: 2571 | SEQ ID NO: 2572 | |
| 262 | | | | SEQ ID NO: 2571 | SEQ ID NO: 2572 | SEQ ID NO: 2573 |
| 263 | | | | | SEQ ID NO: 2572 | |
| 264 | | | | | SEQ ID NO: 2572 | SEQ ID NO: 2573 |
| 265 | | | | | | SEQ ID NO: 2573 |
| 266 | | | | SEQ ID NO: 2571 | | SEQ ID NO: 2573 |
| 267 | SEQ ID NO: 2569 | | | SEQ ID NO: 2571 | | |
| 268 | SEQ ID NO: 2569 | | | SEQ ID NO: 2571 | SEQ ID NO: 2572 | |
| 269 | SEQ ID NO: 2569 | | | SEQ ID NO: 2571 | SEQ ID NO: 2572 | SEQ ID NO: 2573 |
| 270 | SEQ ID NO: 2569 | | | | SEQ ID NO: 2572 | |
| 271 | SEQ ID NO: 2569 | | | | SEQ ID NO: 2572 | SEQ ID NO: 2573 |
| 272 | SEQ ID NO: 2569 | | | | | SEQ ID NO: 2573 |
| 273 | SEQ ID NO: 2569 | | | SEQ ID NO: 2571 | | SEQ ID NO: 2573 |
| 274 | SEQ ID NO: 2569 | KVS | | SEQ ID NO: 2571 | | |
| 275 | SEQ ID NO: 2569 | KVS | | SEQ ID NO: 2571 | SEQ ID NO: 2572 | |
| 276 | SEQ ID NO: 2569 | KVS | | SEQ ID NO: 2571 | SEQ ID NO: 2572 | SEQ ID NO: 2573 |
| 277 | SEQ ID NO: 2569 | KVS | | | SEQ ID NO: 2572 | |
| 278 | SEQ ID NO: 2569 | KVS | | | SEQ ID NO: 2572 | SEQ ID NO: 2573 |
| 279 | SEQ ID NO: 2569 | KVS | | | | SEQ ID NO: 2573 |
| 280 | SEQ ID NO: 2569 | KVS | | SEQ ID NO: 2571 | | SEQ ID NO: 2573 |
| 281 | SEQ ID NO: 2569 | KVS | SEQ ID NO: 2570 | SEQ ID NO: 2571 | | |
| 282 | SEQ ID NO: 2569 | KVS | SEQ ID NO: 2570 | SEQ ID NO: 2571 | SEQ ID NO: 2572 | |
| 283 | SEQ ID NO: 2569 | KVS | SEQ ID NO: 2570 | SEQ ID NO: 2571 | SEQ ID NO: 2572 | SEQ ID NO: 2573 |
| 284 | SEQ ID NO: 2569 | KVS | SEQ ID NO: 2570 | | SEQ ID NO: 2572 | |
| 285 | SEQ ID NO: 2569 | KVS | SEQ ID NO: 2570 | | SEQ ID NO: 2572 | SEQ ID NO: 2573 |
| 286 | SEQ ID NO: 2569 | KVS | SEQ ID NO: 2570 | SEQ ID NO: 2571 | | SEQ ID NO: 2573 |
| 287 | SEQ ID NO: 2569 | KVS | SEQ ID NO: 2570 | | | SEQ ID NO: 2573 |
| 288 | | KVS | | SEQ ID NO: 2571 | | |
| 289 | | KVS | | SEQ ID NO: 2571 | SEQ ID NO: 2572 | |
| 290 | | KVS | | SEQ ID NO: 2571 | SEQ ID NO: 2572 | SEQ ID NO: 2573 |
| 291 | | KVS | | | SEQ ID NO: 2572 | |
| 292 | | KVS | | | SEQ ID NO: 2572 | SEQ ID NO: 2573 |
| 293 | | KVS | | | | SEQ ID NO: 2573 |
| 294 | | KVS | | SEQ ID NO: 2571 | | SEQ ID NO: 2573 |
| 295 | | KVS | SEQ ID NO: 2570 | SEQ ID NO: 2571 | | |
| 296 | | KVS | SEQ ID NO: 2570 | SEQ ID NO: 2571 | SEQ ID NO: 2572 | |
| 297 | | KVS | SEQ ID NO: 2570 | SEQ ID NO: 2571 | SEQ ID NO: 2572 | SEQ ID NO: 2573 |
| 298 | | KVS | SEQ ID NO: 2570 | | SEQ ID NO: 2572 | |
| 299 | | KVS | SEQ ID NO: 2570 | | SEQ ID NO: 2572 | SEQ ID NO: 2573 |
| 300 | | KVS | SEQ ID NO: 2570 | | | SEQ ID NO: 2573 |
| 301 | | KVS | SEQ ID NO: 2570 | SEQ ID NO: 2571 | | SEQ ID NO: 2573 |
| 302 | | | SEQ ID NO: 2570 | SEQ ID NO: 2571 | | |
| 303 | | | SEQ ID NO: 2570 | SEQ ID NO: 2571 | SEQ ID NO: 2572 | |
| 304 | | | SEQ ID NO: 2570 | SEQ ID NO: 2571 | SEQ ID NO: 2572 | SEQ ID NO: 2573 |
| 305 | | | SEQ ID NO: 2570 | | SEQ ID NO: 2572 | |
| 306 | | | SEQ ID NO: 2570 | | SEQ ID NO: 2572 | SEQ ID NO: 2573 |
| 307 | | | SEQ ID NO: 2570 | | | SEQ ID NO: 2573 |
| 308 | | | SEQ ID NO: 2570 | SEQ ID NO: 2571 | | SEQ ID NO: 2573 |
| 309 | SEQ ID NO: 2569 | | SEQ ID NO: 2570 | SEQ ID NO: 2571 | | |
| 310 | SEQ ID NO: 2569 | | SEQ ID NO: 2570 | SEQ ID NO: 2571 | SEQ ID NO: 2572 | |
| 311 | SEQ ID NO: 2569 | | SEQ ID NO: 2570 | SEQ ID NO: 2571 | SEQ ID NO: 2572 | SEQ ID NO: 2573 |
| 312 | SEQ ID NO: 2569 | | SEQ ID NO: 2570 | | SEQ ID NO: 2572 | |
| 313 | SEQ ID NO: 2569 | | SEQ ID NO: 2570 | | SEQ ID NO: 2572 | SEQ ID NO: 2573 |
| 314 | SEQ ID NO: 2569 | | SEQ ID NO: 2570 | | | SEQ ID NO: 2573 |
| 315 | SEQ ID NO: 2569 | | SEQ ID NO: 2570 | SEQ ID NO: 2571 | | SEQ ID NO: 2573 |
| 316 | SEQ ID NO: 2576 | | | | | |
| 317 | SEQ ID NO: 2576 | WAS | | | | |
| 318 | SEQ ID NO: 2576 | WAS | SEQ ID NO: 2577 | | | |
| 319 | | WAS | | | | |
| 320 | | WAS | SEQ ID NO: 2577 | | | |
| 321 | | | SEQ ID NO: 2577 | | | |
| 322 | SEQ ID NO: 2576 | | SEQ ID NO: 2577 | | | |
| 323 | | | | SEQ ID NO: 2578 | | |
| 324 | | | | SEQ ID NO: 2578 | SEQ ID NO: 2579 | |
| 325 | | | | SEQ ID NO: 2578 | SEQ ID NO: 2579 | SEQ ID NO: 2580 |
| 326 | | | | | SEQ ID NO: 2579 | |
| 327 | | | | | SEQ ID NO: 2579 | SEQ ID NO: 2580 |
| 328 | | | | | | SEQ ID NO: 2580 |
| 329 | | | | SEQ ID NO: 2578 | | SEQ ID NO: 2580 |
| 330 | SEQ ID NO: 2576 | | | SEQ ID NO: 2578 | | |
| 331 | SEQ ID NO: 2576 | | | SEQ ID NO: 2578 | SEQ ID NO: 2579 | |
| 332 | SEQ ID NO: 2576 | | | SEQ ID NO: 2578 | SEQ ID NO: 2579 | SEQ ID NO: 2580 |
| 333 | SEQ ID NO: 2576 | | | | SEQ ID NO: 2579 | |
| 334 | SEQ ID NO: 2576 | | | | SEQ ID NO: 2579 | SEQ ID NO: 2580 |
| 335 | SEQ ID NO: 2576 | | | | | SEQ ID NO: 2580 |
| 336 | SEQ ID NO: 2576 | | | SEQ ID NO: 2578 | | SEQ ID NO: 2580 |
| 337 | SEQ ID NO: 2576 | WAS | | SEQ ID NO: 2578 | | |
| 338 | SEQ ID NO: 2576 | WAS | | SEQ ID NO: 2578 | SEQ ID NO: 2579 | |
| 339 | SEQ ID NO: 2576 | WAS | | SEQ ID NO: 2578 | SEQ ID NO: 2579 | SEQ ID NO: 2580 |
| 340 | SEQ ID NO: 2576 | WAS | | | SEQ ID NO: 2579 | |
| 341 | SEQ ID NO: 2576 | WAS | | | SEQ ID NO: 2579 | SEQ ID NO: 2580 |
| 342 | SEQ ID NO: 2576 | WAS | | | | SEQ ID NO: 2580 |
| 343 | SEQ ID NO: 2576 | WAS | | SEQ ID NO: 2578 | | SEQ ID NO: 2580 |
| 344 | SEQ ID NO: 2576 | WAS | SEQ ID NO: 2577 | SEQ ID NO: 2578 | | |
| 345 | SEQ ID NO: 2576 | WAS | SEQ ID NO: 2577 | SEQ ID NO: 2578 | SEQ ID NO: 2579 | |
| 346 | SEQ ID NO: 2576 | WAS | SEQ ID NO: 2577 | SEQ ID NO: 2578 | SEQ ID NO: 2579 | SEQ ID NO: 2580 |
| 347 | SEQ ID NO: 2576 | WAS | SEQ ID NO: 2577 | | SEQ ID NO: 2579 | |
| 348 | SEQ ID NO: 2576 | WAS | SEQ ID NO: 2577 | | SEQ ID NO: 2579 | SEQ ID NO: 2580 |
| 349 | SEQ ID NO: 2576 | WAS | SEQ ID NO: 2577 | SEQ ID NO: 2578 | | SEQ ID NO: 2580 |
| 350 | SEQ ID NO: 2576 | WAS | SEQ ID NO: 2577 | | | SEQ ID NO: 2580 |
| 351 | | WAS | | SEQ ID NO: 2578 | | |
| 352 | | WAS | | SEQ ID NO: 2578 | SEQ ID NO: 2579 | |
| 353 | | WAS | | SEQ ID NO: 2578 | SEQ ID NO: 2579 | SEQ ID NO: 2580 |
| 354 | | WAS | | | SEQ ID NO: 2579 | |
| 355 | | WAS | | | SEQ ID NO: 2579 | SEQ ID NO: 2580 |
| 356 | | WAS | | | | SEQ ID NO: 2580 |
| 357 | | WAS | | SEQ ID NO: 2578 | | SEQ ID NO: 2580 |
| 358 | | WAS | SEQ ID NO: 2577 | SEQ ID NO: 2578 | | |
| 359 | | WAS | SEQ ID NO: 2577 | SEQ ID NO: 2578 | SEQ ID NO: 2579 | |
| 360 | | WAS | SEQ ID NO: 2577 | SEQ ID NO: 2578 | SEQ ID NO: 2579 | SEQ ID NO: 2580 |
| 361 | | WAS | SEQ ID NO: 2577 | | SEQ ID NO: 2579 | |
| 362 | | WAS | SEQ ID NO: 2577 | | SEQ ID NO: 2579 | SEQ ID NO: 2580 |
| 363 | | WAS | SEQ ID NO: 2577 | | | SEQ ID NO: 2580 |
| 364 | | WAS | SEQ ID NO: 2577 | SEQ ID NO: 2578 | | SEQ ID NO: 2580 |
| 365 | | | SEQ ID NO: 2577 | SEQ ID NO: 2578 | | |
| 366 | | | SEQ ID NO: 2577 | SEQ ID NO: 2578 | SEQ ID NO: 2579 | |
| 367 | | | SEQ ID NO: 2577 | SEQ ID NO: 2578 | SEQ ID NO: 2579 | SEQ ID NO: 2580 |
| 368 | | | SEQ ID NO: 2577 | | SEQ ID NO: 2579 | |
| 369 | | | SEQ ID NO: 2577 | | SEQ ID NO: 2579 | SEQ ID NO: 2580 |
| 370 | | | SEQ ID NO: 2577 | | | SEQ ID NO: 2580 |
| 371 | | | SEQ ID NO: 2577 | SEQ ID NO: 2578 | | SEQ ID NO: 2580 |
| 372 | SEQ ID NO: 2576 | | SEQ ID NO: 2577 | SEQ ID NO: 2578 | | |
| 373 | SEQ ID NO: 2576 | | SEQ ID NO: 2577 | SEQ ID NO: 2578 | SEQ ID NO: 2579 | |
| 374 | SEQ ID NO: 2576 | | SEQ ID NO: 2577 | SEQ ID NO: 2578 | SEQ ID NO: 2579 | SEQ ID NO: 2580 |
| 375 | SEQ ID NO: 2576 | | SEQ ID NO: 2577 | | SEQ ID NO: 2579 | |
| 376 | SEQ ID NO: 2576 | | SEQ ID NO: 2577 | | SEQ ID NO: 2579 | SEQ ID NO: 2580 |
| 377 | SEQ ID NO: 2576 | | SEQ ID NO: 2577 | | | SEQ ID NO: 2580 |
| 378 | SEQ ID NO: 2576 | | SEQ ID NO: 2577 | SEQ ID NO: 2578 | | SEQ ID NO: 2580 |

TABLE I3

| | Light Chain HVR | | | Heavy Chain HVR | | |
|---|---|---|---|---|---|---|
| Antibody | L1 | L2 | L3 | H1 | H2 | H3 |
| 1 | SEQ ID NO: 2582 | | | | | |
| 2 | SEQ ID NO: 2582 | (I/V)KS | | | | |
| 3 | SEQ ID NO: 2582 | (I/V)KS | SEQ ID NO: 2583 | | | |
| 4 | | (I/V)KS | | | | |
| 5 | | (I/V)KS | SEQ ID NO: 2583 | | | |
| 6 | | | SEQ ID NO: 2583 | | | |
| 7 | SEQ ID NO: 2582 | | SEQ ID NO: 2583 | | | |
| 8 | SEQ ID NO: 2582 | | | SEQ ID NO: 2543 | | |
| 9 | SEQ ID NO: 2582 | | | SEQ ID NO: 2543 | SEQ ID NO: 2544 | |
| 10 | SEQ ID NO: 2582 | | | SEQ ID NO: 2543 | SEQ ID NO: 2544 | SEQ ID NO: 2545 |
| 11 | SEQ ID NO: 2582 | | | | SEQ ID NO: 2544 | |
| 12 | SEQ ID NO: 2582 | | | | SEQ ID NO: 2544 | SEQ ID NO: 2545 |
| 13 | SEQ ID NO: 2582 | | | | | SEQ ID NO: 2545 |
| 14 | SEQ ID NO: 2582 | | | SEQ ID NO: 2543 | | SEQ ID NO: 2545 |
| 15 | SEQ ID NO: 2582 | (I/V)KS | | SEQ ID NO: 2543 | | |
| 16 | SEQ ID NO: 2582 | (I/V)KS | | SEQ ID NO: 2543 | SEQ ID NO: 2544 | |
| 17 | SEQ ID NO: 2582 | (I/V)KS | | SEQ ID NO: 2543 | SEQ ID NO: 2544 | SEQ ID NO: 2545 |
| 18 | SEQ ID NO: 2582 | (I/V)KS | | | SEQ ID NO: 2544 | |
| 19 | SEQ ID NO: 2582 | (I/V)KS | | | SEQ ID NO: 2544 | SEQ ID NO: 2545 |
| 20 | SEQ ID NO: 2582 | (I/V)KS | | | | SEQ ID NO: 2545 |
| 21 | SEQ ID NO: 2582 | (I/V)KS | | SEQ ID NO: 2543 | | SEQ ID NO: 2545 |
| 22 | SEQ ID NO: 2582 | (I/V)KS | SEQ ID NO: 2583 | SEQ ID NO: 2543 | | |
| 23 | SEQ ID NO: 2582 | (I/V)KS | SEQ ID NO: 2583 | SEQ ID NO: 2543 | SEQ ID NO: 2544 | |
| 24 | SEQ ID NO: 2582 | (I/V)KS | SEQ ID NO: 2583 | SEQ ID NO: 2543 | SEQ ID NO: 2544 | SEQ ID NO: 2545 |
| 25 | SEQ ID NO: 2582 | (I/V)KS | SEQ ID NO: 2583 | | SEQ ID NO: 2544 | |
| 26 | SEQ ID NO: 2582 | (I/V)KS | SEQ ID NO: 2583 | | SEQ ID NO: 2544 | SEQ ID NO: 2545 |
| 27 | SEQ ID NO: 2582 | (I/V)KS | SEQ ID NO: 2583 | SEQ ID NO: 2543 | | SEQ ID NO: 2545 |
| 28 | SEQ ID NO: 2582 | (I/V)KS | SEQ ID NO: 2583 | | | SEQ ID NO: 2545 |
| 29 | | (I/V)KS | | SEQ ID NO: 2543 | | |
| 30 | | (I/V)KS | | SEQ ID NO: 2543 | SEQ ID NO: 2544 | |
| 31 | | (I/V)KS | | SEQ ID NO: 2543 | SEQ ID NO: 2544 | SEQ ID NO: 2545 |
| 32 | | (I/V)KS | | | SEQ ID NO: 2544 | |
| 33 | | (I/V)KS | | | SEQ ID NO: 2544 | SEQ ID NO: 2545 |
| 34 | | (I/V)KS | | | | SEQ ID NO: 2545 |
| 35 | | (I/V)KS | | SEQ ID NO: 2543 | | SEQ ID NO: 2545 |
| 36 | | (I/V)KS | SEQ ID NO: 2583 | SEQ ID NO: 2543 | | |
| 37 | | (I/V)KS | SEQ ID NO: 2583 | SEQ ID NO: 2543 | SEQ ID NO: 2544 | |
| 38 | | (I/V)KS | SEQ ID NO: 2583 | SEQ ID NO: 2543 | SEQ ID NO: 2544 | SEQ ID NO: 2545 |
| 39 | | (I/V)KS | SEQ ID NO: 2583 | | SEQ ID NO: 2544 | |
| 40 | | (I/V)KS | SEQ ID NO: 2583 | | SEQ ID NO: 2544 | SEQ ID NO: 2545 |
| 41 | | (I/V)KS | SEQ ID NO: 2583 | | | SEQ ID NO: 2545 |
| 42 | | (I/V)KS | SEQ ID NO: 2583 | SEQ ID NO: 2543 | | SEQ ID NO: 2545 |
| 43 | | | SEQ ID NO: 2583 | SEQ ID NO: 2543 | | |
| 44 | | | SEQ ID NO: 2583 | SEQ ID NO: 2543 | SEQ ID NO: 2544 | |
| 45 | | | SEQ ID NO: 2583 | SEQ ID NO: 2543 | SEQ ID NO: 2544 | SEQ ID NO: 2545 |
| 46 | | | SEQ ID NO: 2583 | | SEQ ID NO: 2544 | |
| 47 | | | SEQ ID NO: 2583 | | SEQ ID NO: 2544 | SEQ ID NO: 2545 |
| 48 | | | SEQ ID NO: 2583 | | | SEQ ID NO: 2545 |
| 49 | | | SEQ ID NO: 2583 | SEQ ID NO: 2543 | | SEQ ID NO: 2545 |
| 50 | SEQ ID NO: 2582 | | SEQ ID NO: 2583 | SEQ ID NO: 2543 | | |
| 51 | SEQ ID NO: 2582 | | SEQ ID NO: 2583 | SEQ ID NO: 2543 | SEQ ID NO: 2544 | |
| 52 | SEQ ID NO: 2582 | | SEQ ID NO: 2583 | SEQ ID NO: 2543 | SEQ ID NO: 2544 | SEQ ID NO: 2545 |
| 53 | SEQ ID NO: 2582 | | SEQ ID NO: 2583 | | SEQ ID NO: 2544 | |
| 54 | SEQ ID NO: 2582 | | SEQ ID NO: 2583 | | SEQ ID NO: 2544 | SEQ ID NO: 2545 |
| 55 | SEQ ID NO: 2582 | | SEQ ID NO: 2583 | | | SEQ ID NO: 2545 |
| 56 | SEQ ID NO: 2582 | | SEQ ID NO: 2583 | SEQ ID NO: 2543 | | SEQ ID NO: 2545 |
| 57 | SEQ ID NO: 2582 | | | SEQ ID NO: 2550 | | |
| 58 | SEQ ID NO: 2582 | | | SEQ ID NO: 2550 | SEQ ID NO: 2551 | |
| 59 | SEQ ID NO: 2582 | | | SEQ ID NO: 2550 | SEQ ID NO: 2551 | SEQ ID NO: 2552 |
| 60 | SEQ ID NO: 2582 | | | | SEQ ID NO: 2551 | |
| 61 | SEQ ID NO: 2582 | | | | SEQ ID NO: 2551 | SEQ ID NO: 2552 |
| 62 | SEQ ID NO: 2582 | | | | | SEQ ID NO: 2552 |
| 63 | SEQ ID NO: 2582 | | | SEQ ID NO: 2550 | | SEQ ID NO: 2552 |
| 64 | SEQ ID NO: 2582 | (I/V)KS | | SEQ ID NO: 2550 | | |
| 65 | SEQ ID NO: 2582 | (I/V)KS | | SEQ ID NO: 2550 | SEQ ID NO: 2551 | |
| 66 | SEQ ID NO: 2582 | (I/V)KS | | SEQ ID NO: 2550 | SEQ ID NO: 2551 | SEQ ID NO: 2552 |
| 67 | SEQ ID NO: 2582 | (I/V)KS | | | SEQ ID NO: 2551 | |
| 68 | SEQ ID NO: 2582 | (I/V)KS | | | SEQ ID NO: 2551 | SEQ ID NO: 2552 |
| 69 | SEQ ID NO: 2582 | (I/V)KS | | | | SEQ ID NO: 2552 |
| 70 | SEQ ID NO: 2582 | (I/V)KS | | SEQ ID NO: 2550 | | SEQ ID NO: 2552 |
| 71 | SEQ ID NO: 2582 | (I/V)KS | SEQ ID NO: 2583 | SEQ ID NO: 2550 | | |
| 72 | SEQ ID NO: 2582 | (I/V)KS | SEQ ID NO: 2583 | SEQ ID NO: 2550 | SEQ ID NO: 2551 | |
| 73 | SEQ ID NO: 2582 | (I/V)KS | SEQ ID NO: 2583 | SEQ ID NO: 2550 | SEQ ID NO: 2551 | SEQ ID NO: 2552 |
| 74 | SEQ ID NO: 2582 | (I/V)KS | SEQ ID NO: 2583 | | SEQ ID NO: 2551 | |
| 75 | SEQ ID NO: 2582 | (I/V)KS | SEQ ID NO: 2583 | | SEQ ID NO: 2551 | SEQ ID NO: 2552 |
| 76 | SEQ ID NO: 2582 | (I/V)KS | SEQ ID NO: 2583 | | | SEQ ID NO: 2552 |
| 77 | SEQ ID NO: 2582 | (I/V)KS | SEQ ID NO: 2583 | SEQ ID NO: 2550 | | SEQ ID NO: 2552 |
| 78 | | (I/V)KS | | SEQ ID NO: 2550 | | |
| 79 | | (I/V)KS | | SEQ ID NO: 2550 | SEQ ID NO: 2551 | |
| 80 | | (I/V)KS | | SEQ ID NO: 2550 | SEQ ID NO: 2551 | SEQ ID NO: 2552 |
| 81 | | (I/V)KS | | | SEQ ID NO: 2551 | |
| 82 | | (I/V)KS | | | SEQ ID NO: 2551 | SEQ ID NO: 2552 |
| 83 | | (I/V)KS | | | | SEQ ID NO: 2552 |
| 84 | | (I/V)KS | | SEQ ID NO: 2550 | | SEQ ID NO: 2552 |
| 85 | | (I/V)KS | SEQ ID NO: 2583 | SEQ ID NO: 2550 | | |
| 86 | | (I/V)KS | SEQ ID NO: 2583 | SEQ ID NO: 2550 | SEQ ID NO: 2551 | |
| 87 | | (I/V)KS | SEQ ID NO: 2583 | SEQ ID NO: 2550 | SEQ ID NO: 2551 | SEQ ID NO: 2552 |
| 88 | | (I/V)KS | SEQ ID NO: 2583 | | SEQ ID NO: 2551 | |
| 89 | | (I/V)KS | SEQ ID NO: 2583 | | SEQ ID NO: 2551 | SEQ ID NO: 2552 |
| 90 | | (I/V)KS | SEQ ID NO: 2583 | | | SEQ ID NO: 2552 |
| 91 | | (I/V)KS | SEQ ID NO: 2583 | SEQ ID NO: 2550 | | SEQ ID NO: 2552 |
| 92 | | | SEQ ID NO: 2583 | SEQ ID NO: 2550 | | |
| 93 | | | SEQ ID NO: 2583 | SEQ ID NO: 2550 | SEQ ID NO: 2551 | |
| 94 | | | SEQ ID NO: 2583 | SEQ ID NO: 2550 | SEQ ID NO: 2551 | SEQ ID NO: 2552 |
| 95 | | | SEQ ID NO: 2583 | | SEQ ID NO: 2551 | |
| 96 | | | SEQ ID NO: 2583 | | SEQ ID NO: 2551 | SEQ ID NO: 2552 |
| 97 | | | SEQ ID NO: 2583 | | | SEQ ID NO: 2552 |
| 98 | | | SEQ ID NO: 2583 | SEQ ID NO: 2550 | | SEQ ID NO: 2552 |
| 99 | SEQ ID NO: 2582 | | SEQ ID NO: 2583 | SEQ ID NO: 2550 | | |
| 100 | SEQ ID NO: 2582 | | SEQ ID NO: 2583 | SEQ ID NO: 2550 | SEQ ID NO: 2551 | |
| 101 | SEQ ID NO: 2582 | | SEQ ID NO: 2583 | SEQ ID NO: 2550 | SEQ ID NO: 2551 | SEQ ID NO: 2552 |
| 102 | SEQ ID NO: 2582 | | SEQ ID NO: 2583 | | SEQ ID NO: 2551 | |
| 103 | SEQ ID NO: 2582 | | SEQ ID NO: 2583 | | SEQ ID NO: 2551 | SEQ ID NO: 2552 |
| 104 | SEQ ID NO: 2582 | | SEQ ID NO: 2583 | | | SEQ ID NO: 2552 |
| 105 | SEQ ID NO: 2582 | | SEQ ID NO: 2583 | SEQ ID NO: 2550 | | SEQ ID NO: 2552 |
| 106 | SEQ ID NO: 2582 | | | SEQ ID NO: 2557 | | |
| 107 | SEQ ID NO: 2582 | | | SEQ ID NO: 2557 | SEQ ID NO: 2558 | |
| 108 | SEQ ID NO: 2582 | | | SEQ ID NO: 2557 | SEQ ID NO: 2558 | SEQ ID NO: 2559 |
| 109 | SEQ ID NO: 2582 | | | | SEQ ID NO: 2558 | |
| 110 | SEQ ID NO: 2582 | | | | SEQ ID NO: 2558 | SEQ ID NO: 2559 |
| 111 | SEQ ID NO: 2582 | | | | | SEQ ID NO: 2559 |
| 112 | SEQ ID NO: 2582 | | | SEQ ID NO: 2557 | | SEQ ID NO: 2559 |
| 113 | SEQ ID NO: 2582 | (I/V)KS | | SEQ ID NO: 2557 | | |
| 114 | SEQ ID NO: 2582 | (I/V)KS | | SEQ ID NO: 2557 | SEQ ID NO: 2558 | |
| 115 | SEQ ID NO: 2582 | (I/V)KS | | SEQ ID NO: 2557 | SEQ ID NO: 2558 | SEQ ID NO: 2559 |
| 116 | SEQ ID NO: 2582 | (I/V)KS | | | SEQ ID NO: 2558 | |
| 117 | SEQ ID NO: 2582 | (I/V)KS | | | SEQ ID NO: 2558 | SEQ ID NO: 2559 |
| 118 | SEQ ID NO: 2582 | (I/V)KS | | | | SEQ ID NO: 2559 |
| 119 | SEQ ID NO: 2582 | (I/V)KS | | SEQ ID NO: 2557 | | SEQ ID NO: 2559 |
| 120 | SEQ ID NO: 2582 | (I/V)KS | SEQ ID NO: 2583 | SEQ ID NO: 2557 | | |
| 121 | SEQ ID NO: 2582 | (I/V)KS | SEQ ID NO: 2583 | SEQ ID NO: 2557 | SEQ ID NO: 2558 | |
| 122 | SEQ ID NO: 2582 | (I/V)KS | SEQ ID NO: 2583 | SEQ ID NO: 2557 | SEQ ID NO: 2558 | SEQ ID NO: 2559 |
| 123 | SEQ ID NO: 2582 | (I/V)KS | SEQ ID NO: 2583 | | SEQ ID NO: 2558 | |
| 124 | SEQ ID NO: 2582 | (I/V)KS | SEQ ID NO: 2583 | | SEQ ID NO: 2558 | SEQ ID NO: 2559 |
| 125 | SEQ ID NO: 2582 | (I/V)KS | SEQ ID NO: 2583 | SEQ ID NO: 2557 | | SEQ ID NO: 2559 |
| 126 | SEQ ID NO: 2582 | (I/V)KS | SEQ ID NO: 2583 | | | SEQ ID NO: 2559 |
| 127 | | (I/V)KS | | SEQ ID NO: 2557 | | |
| 128 | | (I/V)KS | | SEQ ID NO: 2557 | SEQ ID NO: 2558 | |
| 129 | | (I/V)KS | | SEQ ID NO: 2557 | SEQ ID NO: 2558 | SEQ ID NO: 2559 |
| 130 | | (I/V)KS | | | SEQ ID NO: 2558 | |
| 131 | | (I/V)KS | | | SEQ ID NO: 2558 | SEQ ID NO: 2559 |
| 132 | | (I/V)KS | | | | SEQ ID NO: 2559 |
| 133 | | (I/V)KS | | SEQ ID NO: 2557 | | SEQ ID NO: 2559 |
| 134 | | (I/V)KS | SEQ ID NO: 2583 | SEQ ID NO: 2557 | | |
| 135 | | (I/V)KS | SEQ ID NO: 2583 | SEQ ID NO: 2557 | SEQ ID NO: 2558 | |
| 136 | | (I/V)KS | SEQ ID NO: 2583 | SEQ ID NO: 2557 | SEQ ID NO: 2558 | SEQ ID NO: 2559 |
| 137 | | (I/V)KS | SEQ ID NO: 2583 | | SEQ ID NO: 2558 | |
| 138 | | (I/V)KS | SEQ ID NO: 2583 | | SEQ ID NO: 2558 | SEQ ID NO: 2559 |
| 139 | | (I/V)KS | SEQ ID NO: 2583 | | | SEQ ID NO: 2559 |
| 140 | | (I/V)KS | SEQ ID NO: 2583 | SEQ ID NO: 2557 | | SEQ ID NO: 2559 |
| 141 | | | SEQ ID NO: 2583 | SEQ ID NO: 2557 | | |
| 142 | | | SEQ ID NO: 2583 | SEQ ID NO: 2557 | SEQ ID NO: 2558 | |
| 143 | | | SEQ ID NO: 2583 | SEQ ID NO: 2557 | SEQ ID NO: 2558 | SEQ ID NO: 2559 |
| 144 | | | SEQ ID NO: 2583 | | SEQ ID NO: 2558 | |
| 145 | | | SEQ ID NO: 2583 | | SEQ ID NO: 2558 | SEQ ID NO: 2559 |
| 146 | | | SEQ ID NO: 2583 | | | SEQ ID NO: 2559 |
| 147 | | | SEQ ID NO: 2583 | SEQ ID NO: 2557 | | SEQ ID NO: 2559 |
| 148 | SEQ ID NO: 2582 | | SEQ ID NO: 2583 | SEQ ID NO: 2557 | | |
| 149 | SEQ ID NO: 2582 | | SEQ ID NO: 2583 | SEQ ID NO: 2557 | SEQ ID NO: 2558 | |
| 150 | SEQ ID NO: 2582 | | SEQ ID NO: 2583 | SEQ ID NO: 2557 | SEQ ID NO: 2558 | SEQ ID NO: 2559 |
| 151 | SEQ ID NO: 2582 | | SEQ ID NO: 2583 | | SEQ ID NO: 2558 | |
| 152 | SEQ ID NO: 2582 | | SEQ ID NO: 2583 | | SEQ ID NO: 2558 | SEQ ID NO: 2559 |
| 153 | SEQ ID NO: 2582 | | SEQ ID NO: 2583 | | | SEQ ID NO: 2559 |
| 154 | SEQ ID NO: 2582 | | SEQ ID NO: 2583 | SEQ ID NO: 2557 | | SEQ ID NO: 2559 |
| 155 | SEQ ID NO: 2582 | | | SEQ ID NO: 2564 | | |
| 156 | SEQ ID NO: 2582 | | | SEQ ID NO: 2564 | SEQ ID NO: 2565 | |
| 157 | SEQ ID NO: 2582 | | | SEQ ID NO: 2564 | SEQ ID NO: 2565 | SEQ ID NO: 2566 |
| 158 | SEQ ID NO: 2582 | | | | SEQ ID NO: 2565 | |
| 159 | SEQ ID NO: 2582 | | | | SEQ ID NO: 2565 | SEQ ID NO: 2566 |
| 160 | SEQ ID NO: 2582 | | | | | SEQ ID NO: 2566 |
| 161 | SEQ ID NO: 2582 | | | SEQ ID NO: 2564 | | SEQ ID NO: 2566 |
| 162 | SEQ ID NO: 2582 | (I/V)KS | | SEQ ID NO: 2564 | | |
| 163 | SEQ ID NO: 2582 | (I/V)KS | | SEQ ID NO: 2564 | SEQ ID NO: 2565 | |
| 164 | SEQ ID NO: 2582 | (I/V)KS | | SEQ ID NO: 2564 | SEQ ID NO: 2565 | SEQ ID NO: 2566 |
| 165 | SEQ ID NO: 2582 | (I/V)KS | | | SEQ ID NO: 2565 | |
| 166 | SEQ ID NO: 2582 | (I/V)KS | | | SEQ ID NO: 2565 | SEQ ID NO: 2566 |
| 167 | SEQ ID NO: 2582 | (I/V)KS | | | | SEQ ID NO: 2566 |
| 168 | SEQ ID NO: 2582 | (I/V)KS | | SEQ ID NO: 2564 | | SEQ ID NO: 2566 |
| 169 | SEQ ID NO: 2582 | (I/V)KS | SEQ ID NO: 2583 | SEQ ID NO: 2564 | | |
| 170 | SEQ ID NO: 2582 | (I/V)KS | SEQ ID NO: 2583 | SEQ ID NO: 2564 | SEQ ID NO: 2565 | |
| 171 | SEQ ID NO: 2582 | (I/V)KS | SEQ ID NO: 2583 | SEQ ID NO: 2564 | SEQ ID NO: 2565 | SEQ ID NO: 2566 |
| 172 | SEQ ID NO: 2582 | (I/V)KS | SEQ ID NO: 2583 | | SEQ ID NO: 2565 | |
| 173 | SEQ ID NO: 2582 | (I/V)KS | SEQ ID NO: 2583 | | SEQ ID NO: 2565 | SEQ ID NO: 2566 |
| 174 | SEQ ID NO: 2582 | (I/V)KS | SEQ ID NO: 2583 | SEQ ID NO: 2564 | | SEQ ID NO: 2566 |
| 175 | SEQ ID NO: 2582 | (I/V)KS | SEQ ID NO: 2583 | | | SEQ ID NO: 2566 |
| 176 | | (I/V)KS | | SEQ ID NO: 2564 | | |
| 177 | | (I/V)KS | | SEQ ID NO: 2564 | SEQ ID NO: 2565 | |
| 178 | | (I/V)KS | | SEQ ID NO: 2564 | SEQ ID NO: 2565 | SEQ ID NO: 2566 |
| 179 | | (I/V)KS | | | SEQ ID NO: 2565 | |
| 180 | | (I/V)KS | | | SEQ ID NO: 2565 | SEQ ID NO: 2566 |
| 181 | | (I/V)KS | | | | SEQ ID NO: 2566 |
| 182 | | (I/V)KS | | SEQ ID NO: 2564 | | SEQ ID NO: 2566 |
| 183 | | (I/V)KS | SEQ ID NO: 2583 | SEQ ID NO: 2564 | | |
| 184 | | (I/V)KS | SEQ ID NO: 2583 | SEQ ID NO: 2564 | SEQ ID NO: 2565 | |
| 185 | | (I/V)KS | SEQ ID NO: 2583 | SEQ ID NO: 2564 | SEQ ID NO: 2565 | SEQ ID NO: 2566 |
| 186 | | (I/V)KS | SEQ ID NO: 2583 | | SEQ ID NO: 2565 | |
| 187 | | (I/V)KS | SEQ ID NO: 2583 | | SEQ ID NO: 2565 | SEQ ID NO: 2566 |
| 188 | | (I/V)KS | SEQ ID NO: 2583 | | | SEQ ID NO: 2566 |
| 189 | | (I/V)KS | SEQ ID NO: 2583 | SEQ ID NO: 2564 | | SEQ ID NO: 2566 |
| 190 | | | SEQ ID NO: 2583 | SEQ ID NO: 2564 | | |
| 191 | | | SEQ ID NO: 2583 | SEQ ID NO: 2564 | SEQ ID NO: 2565 | |
| 192 | | | SEQ ID NO: 2583 | SEQ ID NO: 2564 | SEQ ID NO: 2565 | SEQ ID NO: 2566 |
| 193 | | | SEQ ID NO: 2583 | | SEQ ID NO: 2565 | |
| 194 | | | SEQ ID NO: 2583 | | SEQ ID NO: 2565 | SEQ ID NO: 2566 |
| 195 | | | SEQ ID NO: 2583 | | | SEQ ID NO: 2566 |
| 196 | | | SEQ ID NO: 2583 | SEQ ID NO: 2564 | | SEQ ID NO: 2566 |
| 197 | SEQ ID NO: 2582 | | SEQ ID NO: 2583 | SEQ ID NO: 2564 | | |
| 198 | SEQ ID NO: 2582 | | SEQ ID NO: 2583 | SEQ ID NO: 2564 | SEQ ID NO: 2565 | |
| 199 | SEQ ID NO: 2582 | | SEQ ID NO: 2583 | SEQ ID NO: 2564 | SEQ ID NO: 2565 | SEQ ID NO: 2566 |
| 200 | SEQ ID NO: 2582 | | SEQ ID NO: 2583 | | SEQ ID NO: 2565 | |
| 201 | SEQ ID NO: 2582 | | SEQ ID NO: 2583 | | SEQ ID NO: 2565 | SEQ ID NO: 2566 |
| 202 | SEQ ID NO: 2582 | | SEQ ID NO: 2583 | | | SEQ ID NO: 2566 |
| 203 | SEQ ID NO: 2582 | | SEQ ID NO: 2583 | SEQ ID NO: 2564 | | SEQ ID NO: 2566 |
| 204 | SEQ ID NO: 2582 | | | SEQ ID NO: 2571 | | |
| 205 | SEQ ID NO: 2582 | | | SEQ ID NO: 2571 | SEQ ID NO: 2572 | |
| 206 | SEQ ID NO: 2582 | | | SEQ ID NO: 2571 | SEQ ID NO: 2572 | SEQ ID NO: 2573 |
| 207 | SEQ ID NO: 2582 | | | | SEQ ID NO: 2572 | |
| 208 | SEQ ID NO: 2582 | | | | SEQ ID NO: 2572 | SEQ ID NO: 2573 |
| 209 | SEQ ID NO: 2582 | | | | | SEQ ID NO: 2573 |
| 210 | SEQ ID NO: 2582 | | | SEQ ID NO: 2571 | | SEQ ID NO: 2573 |
| 211 | SEQ ID NO: 2582 | (I/V)KS | | SEQ ID NO: 2571 | | |
| 212 | SEQ ID NO: 2582 | (I/V)KS | | SEQ ID NO: 2571 | SEQ ID NO: 2572 | |
| 213 | SEQ ID NO: 2582 | (I/V)KS | | SEQ ID NO: 2571 | SEQ ID NO: 2572 | SEQ ID NO: 2573 |
| 214 | SEQ ID NO: 2582 | (I/V)KS | | | SEQ ID NO: 2572 | |
| 215 | SEQ ID NO: 2582 | (I/V)KS | | | SEQ ID NO: 2572 | SEQ ID NO: 2573 |
| 216 | SEQ ID NO: 2582 | (I/V)KS | | | | SEQ ID NO: 2573 |
| 217 | SEQ ID NO: 2582 | (I/V)KS | | SEQ ID NO: 2571 | | SEQ ID NO: 2573 |
| 218 | SEQ ID NO: 2582 | (I/V)KS | SEQ ID NO: 2583 | SEQ ID NO: 2571 | | |
| 219 | SEQ ID NO: 2582 | (I/V)KS | SEQ ID NO: 2583 | SEQ ID NO: 2571 | SEQ ID NO: 2572 | |
| 220 | SEQ ID NO: 2582 | (I/V)KS | SEQ ID NO: 2583 | SEQ ID NO: 2571 | SEQ ID NO: 2572 | SEQ ID NO: 2573 |
| 221 | SEQ ID NO: 2582 | (I/V)KS | SEQ ID NO: 2583 | | SEQ ID NO: 2572 | |
| 222 | SEQ ID NO: 2582 | (I/V)KS | SEQ ID NO: 2583 | | SEQ ID NO: 2572 | SEQ ID NO: 2573 |
| 223 | SEQ ID NO: 2582 | (I/V)KS | SEQ ID NO: 2583 | SEQ ID NO: 2571 | | SEQ ID NO: 2573 |
| 224 | SEQ ID NO: 2582 | (I/V)KS | SEQ ID NO: 2583 | | | SEQ ID NO: 2573 |
| 225 | | (I/V)KS | | SEQ ID NO: 2571 | | |
| 226 | | (I/V)KS | | SEQ ID NO: 2571 | SEQ ID NO: 2572 | |
| 227 | | (I/V)KS | | SEQ ID NO: 2571 | SEQ ID NO: 2572 | SEQ ID NO: 2573 |
| 228 | | (I/V)KS | | | SEQ ID NO: 2572 | |
| 229 | | (I/V)KS | | | SEQ ID NO: 2572 | SEQ ID NO: 2573 |
| 230 | | (I/V)KS | | | | SEQ ID NO: 2573 |
| 231 | | (I/V)KS | | SEQ ID NO: 2571 | | SEQ ID NO: 2573 |
| 232 | | (I/V)KS | SEQ ID NO: 2583 | SEQ ID NO: 2571 | | |
| 233 | | (I/V)KS | SEQ ID NO: 2583 | SEQ ID NO: 2571 | SEQ ID NO: 2572 | |
| 234 | | (I/V)KS | SEQ ID NO: 2583 | SEQ ID NO: 2571 | SEQ ID NO: 2572 | SEQ ID NO: 2573 |
| 235 | | (I/V)KS | SEQ ID NO: 2583 | | SEQ ID NO: 2572 | |
| 236 | | (I/V)KS | SEQ ID NO: 2583 | | SEQ ID NO: 2572 | SEQ ID NO: 2573 |
| 237 | | (I/V)KS | SEQ ID NO: 2583 | | | SEQ ID NO: 2573 |
| 238 | | (I/V)KS | SEQ ID NO: 2583 | SEQ ID NO: 2571 | | SEQ ID NO: 2573 |
| 239 | | | SEQ ID NO: 2583 | SEQ ID NO: 2571 | | |
| 240 | | | SEQ ID NO: 2583 | SEQ ID NO: 2571 | SEQ ID NO: 2572 | |
| 241 | | | SEQ ID NO: 2583 | SEQ ID NO: 2571 | SEQ ID NO: 2572 | SEQ ID NO: 2573 |
| 242 | | | SEQ ID NO: 2583 | | SEQ ID NO: 2572 | |
| 243 | | | SEQ ID NO: 2583 | | SEQ ID NO: 2572 | SEQ ID NO: 2573 |
| 244 | | | SEQ ID NO: 2583 | | | SEQ ID NO: 2573 |
| 245 | | | SEQ ID NO: 2583 | SEQ ID NO: 2571 | | SEQ ID NO: 2573 |
| 246 | SEQ ID NO: 2582 | | SEQ ID NO: 2583 | SEQ ID NO: 2571 | | |
| 247 | SEQ ID NO: 2582 | | SEQ ID NO: 2583 | SEQ ID NO: 2571 | SEQ ID NO: 2572 | |
| 248 | SEQ ID NO: 2582 | | SEQ ID NO: 2583 | SEQ ID NO: 2571 | SEQ ID NO: 2572 | SEQ ID NO: 2573 |
| 249 | SEQ ID NO: 2582 | | SEQ ID NO: 2583 | | SEQ ID NO: 2572 | |
| 250 | SEQ ID NO: 2582 | | SEQ ID NO: 2583 | | SEQ ID NO: 2572 | SEQ ID NO: 2573 |
| 251 | SEQ ID NO: 2582 | | SEQ ID NO: 2583 | | | SEQ ID NO: 2573 |
| 252 | SEQ ID NO: 2582 | | SEQ ID NO: 2583 | SEQ ID NO: 2571 | | SEQ ID NO: 2573 |

TABLE I4

| Comments | Sequence |
|---|---|
| HJ23.4 light chain variable | DVVMTQTPLSLPVSLGDQAFISCRSSQNLVHSNGNTYLHWYLQK |
| region | PGQSPKLLIYIVSNRFSGVPDRFSGSGSGTDFTLEISRVEAEDLGV |
| | YFCSQSTHVPLTFGAGTKLELK (SEQ ID NO: 2539) |
| HJ23.4 heavy chain variable | EVQLQQSGPDLVKPGASVKMSCKASGYTFTDYNIHWVKQSHGK |
| region | TLEWIGYINPNTGGTYYNQKFKGKATMTVNKSSSTAYMELRSLT |
| | SEDSAVYYCVATRWDGVNWAQGTLVTVSA (SEQ ID NO: 2540) |
| HJ23.4 L1 | QNLVHSNGNTY (SEQ ID NO: 2541) |
| HJ23.4 L2 | IVS |
| HJ23.4 L3 | SQSTHVPLT (SEQ ID NO: 2542) |
| HJ23.4 H1 | GYTFTDYN (SEQ ID NO: 2543) |
| HJ23.4 H2 | INPNTGGT (SEQ ID NO: 2544) |
| HJ23.4 H3 | VATRWDGVN (SEQ ID NO: 2545) |
| HJ23.7 light chain variable | DVVMTQTPLSLPVSLGDQASISCRSSQSLVHSNGNTYLHWYLQK |
| region | PGQSPKWYKVSNRFSGVPDRFSGSGSGTDFTLKISRVEAEDLGV |
| | YFCSQSTHVPLTFGAGTKLELK (SEQ ID NO: 2546) |
| HJ23.7 heavy chain variable | EVQLQQSGAELVKPGASVKLSCTSSGFNIKGYYIHWVKQRTEQG |
| region | LEWIGRIDPEDGETKNAPKFQGKATFGTDTFSNTAYLRLSSLTSE |
| | DTGVYYCVRTETRGAYWGPGTLVTVSA (SEQ ID NO: 2547) |
| HJ23.7 L1 | QSLVHSNGNTY (SEQ ID NO: 2548) |
| HJ23.7 L2 | KVS |
| HJ23.7 L3 | SQSTHVPLT (SEQ ID NO: 2549) |
| HJ23.7 H1 | GFNIKGYY (SEQ ID NO: 2550) |
| HJ23.7 H2 | IDPEDGET (SEQ ID NO: 2551) |
| HJ23.7 H3 | VRTETRGAY (SEQ ID NO: 2552) |
| HJ23.8 light chain variable | DVVMTQTPLSLPVSLGDQASISCRSSQSLVHSNGDTYLHWYLQK |
| region | RGQSPKWYKVSNRFSGVPDRFSGSGSGTDFTLKISRVEAEDLGV |
| | YFCSQTTHVPLTFGAGTKLELK (SEQ ID NO: 2553) |
| HJ23.8 heavy chain variable | QVPLQQPGAEFVKPGASVKLSCKASAYTFTRYWMHWVKQRPGR |
| region | GLEWIGRIDPNSGGTNYNEKFKSKATFTVDKPSSTSYMQLSSLTS |
| | EDSAVYFCVFTGTLFDYWGQGTTLTVSS (SEQ ID NO: 2554) |
| HJ23.8 L1 | QSLVHSNGDTY (SEQ ID NO: 2555) |
| HJ23.8 L2 | KVS |
| HJ23.8 L3 | SQTTHVPLT (SEQ ID NO: 2556) |
| HJ23.8 H1 | AYTFTRYW (SEQ ID NO: 2557) |
| HJ23.8 H2 | IDPNSGGT (SEQ ID NO: 2558) |
| HJ23.8 H3 | VFTGTLFDY (SEQ ID NO: 2559) |
| HJ23.9 light chain variable | DVVMTQTPLSLPVSLGDQASISCKSSQSLVHSNGNTYLHWYLQK |
| region | PGQSPKWYKVSNRFSGVPDRFSGSGSGTDFTLKISRVEAEDLGV |
| | YFCSQSTHVPPTFGGGTKLEIK (SEQ ID NO: 2560) |
| HJ23.9 heavy chain variable | EVQLQHSGPVLVKPGASVKMSCKSSGYTFTDYYLNWVKQSHGK |
| region | SPEWIGVINPNTGSTSYNQKFKGKATLTVDKSSSTAYMDLNSLTS |
| | EDSAVYYCATHYYGSIYKQAWFAYWGQGTLVT (SEQ ID NO: 2561) |
| HJ23.9 L1 | QSLVHSNGNTY (SEQ ID NO: 2562) |
| HJ23.9 L2 | KVS |
| HJ23.9 L3 | SQSTHVPPT (SEQ ID NO: 2563) |
| HJ23.9 H1 | GYTFTDYY (SEQ ID NO: 2564) |
| HJ23.9 H2 | INPNTGST (SEQ ID NO: 2565) |
| HJ23.9 H3 | ATHYYGSIYKQAWFAY (SEQ ID NO: 2566) |
| HJ23.10 light chain variable | DVVMTQTPLSLPVSLGDQASISCKSSQSLVHSNGNTYLHWYLQK |
| region | PGQSPKWYKVSNRFSGVPDRFSGSGSGTDFTLKISRVEAEDLGI |
| | YFCSQSTHVPPTFGGGTKLEIK (SEQ ID NO: 2567) |
| HJ23.10 heavy chain | EVQLQHSGPVLVKPGASVKMSCKASGYTFTDYYMNWVKQSHG |
| variable region | KSPEWIGVINPNTGSTSYNQKFKGKATLTVDKSSSTAYMDLNSLT |
| | SEDSAVYYCATHYYGSIYKQAWFAYWGQGTLVTV (SEQ ID NO: 2568) |
| HJ23.10 L1 | QSLVHSNGNTY (SEQ ID NO: 2569) |
| HJ23.10 L2 | KVS |
| HJ23.10 L3 | SQSTHVPPT (SEQ ID NO: 2570) |
| HJ23.10 H1 | GYTFTDYY (SEQ ID NO: 2571) |
| HJ23.10 H2 | INPNTGST (SEQ ID NO: 2572) |
| HJ23.10 H3 | ATHYYGSIYKQAWFAY (SEQ ID NO: 2573) |
| HJ23.13 light chain variable | DIVMSQSPSSLAVSVGEKVTMSCKSSQSLLYSSNLKNYLAWFQQ |
| region | KPGQSPKLLIYWASIRESGVPDRFTGSGSGTDFTLTINSVKAEDLA |
| | VYYCQQYYTFPLTFGAGTKLELK(SEQ ID NO: 2574) |
| HJ23.13 heavy chain | EVQLVETGGGLVQPKGSLKLSCAASGFSFNINAMHWVRQAPGT |
| variable region | GLKWVARIRSGSNDFATYYADSVKDRFTISRDDSHSMLYLQMN |
| | NLKTEDTAIYFCVREYVNYFVHWGQGTLVTVSA (SEQ ID NO: 2575) |
| HJ23.13 L1 | QSLLYSSNLKNY (SEQ ID NO: 2576) |
| HJ23.13 L2 | WAS |
| HJ23.13 L3 | QQYYTFPLT (SEQ ID NO: 2577) |
| HJ23.13 H1 | GFSFNINA (SEQ ID NO: 2578) |
| HJ23.13 H2 | IRSGSNDFAT (SEQ ID NO: 2579) |
| HJ23.13 H3 | VREYVNYFVH (SEQ ID NO: 2580) |
| | DHRDAGDLWFPGES (SEQ ID NO: 2581) |
| Consensus L1 | QX1LVHSNGX2TY, where X1 is S, T, N, or Q and X2 is D or N |
| | (SEQ ID NO: 2582) |
| Consensus L2 | X1VS, where X1 is I or K |
| Consensus L3 | SQX1THVPX2T, where X1 is S, T, N, or Q and X2 is P or L |
| | (SEQ ID NO: 2583) |

[0484] In some embodiments, each of the light chain variable regions and each of the heavy chain variable regions disclosed above, including those in Table 17B (e.g., antibody 1-378) and Table 17C (antibody 1-252) may be attached to the light chain constant regions (TABLE EN1) and heavy chain constant regions (TABLE EN2) to form complete antibody light and heavy chains, respectively, as further discussed below. Further, each of the generated heavy and light chain sequences may be combined to form a complete antibody structure. It should be understood that the heavy chain and light chain variable regions provided herein can also be attached to other constant domains having different sequences than the exemplary sequences listed herein.

[0485] J. PCT Patent Application Publication No. WO2020/079580A1

[0486] In some embodiments, the TREM2 agonist is an antibody, or an antigen-binding fragment thereof, as described in PCT Patent Application Publication No. WO2020/079580A1 (“the '580 application”), which is incorporated by reference herein, in its entirety.

[0487] In some embodiments, the TREM2 binding agent comprises an antibody that comprises a light chain variable domain comprising a CDRL1, CDRL2, and CDRL3, and a heavy chain variable domain comprising a CDRH1, CDRH2, and CDRH3 disclosed in the '580 application specification. In some embodiments, the TREM2 binding agent comprises an antibody that comprises a light chain variable domain and a heavy chain variable domain disclosed in the '580 application specification.

[0488] In some embodiments, the antibody or antigen-binding fragment thereof comprises:

[0489] a) a heavy chain variable region CDR1 comprising SEQ ID NO:2623 or SEQ ID NO:2626 or SEQ ID NO:2627 or SEQ ID NO:2629; a heavy chain variable region CDR2 comprising SEQ ID NO:2624 or SEQ ID NO:2628, or SEQ ID NO:2630; a heavy chain variable region CDR3 comprising SEQ ID NO:2625 or SEQ ID NO:2631; a light chain variable region CDR1 comprising SEQ ID NO:2636 or SEQ ID NO:2639 or SEQ ID NO:2642; a light chain variable region CDR2 comprising SEQ ID NO:2637 or SEQ ID NO:2640; and a light chain variable region CDR3 comprising SEQ ID NO:2638 or SEQ ID NO:2641;

[0490] b) a heavy chain variable region CDR1 comprising SEQ ID NO:2586 or SEQ ID NO:2589 or SEQ ID NO:2590 or SEQ ID NO:2592; a heavy chain variable region CDR2 comprising SEQ ID NO:2587 or SEQ ID NO:2591 or SEQ ID NO:2593; a heavy chain variable region CDR3 comprising SEQ ID NO:2588 or SEQ ID NO:2594; a light chain variable region CDR1 comprising SEQ ID NO:2599 or SEQ ID NO:2602 or SEQ ID NO:2605; a light chain variable region CDR2 comprising SEQ ID NO:2600 or SEQ ID NO:2603; and a light chain variable region CDR3 comprising SEQ ID NO:2601 or SEQ ID NO:2604;

[0491] c) a heavy chain variable region CDR1 comprising SEQ ID NO:2586 or SEQ ID NO:2589 or SEQ ID NO:2590 or SEQ ID NO:2592; a heavy chain variable region CDR2 comprising SEQ ID NO:2587 or SEQ ID NO:2591 or SEQ ID NO:2593; a heavy chain variable region CDR3 comprising SEQ ID NO:2588 or SEQ ID NO:2594; a light chain variable region CDR1 comprising SEQ ID NO:2599 or SEQ ID NO:2602 or SEQ ID NO:2605; a light chain variable region CDR2 comprising SEQ ID NO:2600 or SEQ ID NO:2603; and a light chain variable region CDR3 comprising SEQ ID NO:2660 or SEQ ID NO:2661; or

[0492] d) a heavy chain variable region CDR1 comprising SEQ ID NO:2666 or SEQ ID NO:2669 or SEQ ID NO:2670 or SEQ ID NO:2672; a heavy chain variable region CDR2 comprising SEQ ID NO:2667 or SEQ ID NO:2671 or SEQ ID NO:2673; a heavy chain variable region CDR3 comprising SEQ ID NO:2668 or SEQ ID NO:2674; a light chain variable region CDR1 comprising SEQ ID NO:2679 or SEQ ID NO:2682 or SEQ ID NO:2685; a light chain variable region CDR2 comprising SEQ ID NO:2680 or SEQ ID NO:2683; and a light chain variable region CDR3 comprising SEQ ID NO:2681 or SEQ ID NO:2684.

[0493] In some embodiments, the antibody or antigen-binding fragment thereof comprises:

[0494] a) a VH polypeptide sequence having at least 95% sequence identity to SEQ ID NO:2595 or to SEQ ID NO:2632, and a VL polypeptide sequence having at least 95% sequence identity to SEQ ID NO:2606 or to SEQ ID NO:2643; or

[0495] b) a VH polypeptide sequence having at least 95% sequence identity to SEQ ID NO:2595 or to SEQ ID NO:2675, and a VL polypeptide sequence having at least 95% sequence identity to SEQ ID NO:2662 or to SEQ ID NO:2686.

[0496] In some embodiments, the antibody or antigen-binding fragment thereof comprises:

a) a heavy chain variable region CDR1 comprising SEQ ID NO:2589; a heavy chain variable region CDR2 comprising SEQ ID NO:2587; a heavy chain variable region CDR3 comprising SEQ ID NO:2588; a light chain variable region CDR1 comprising SEQ ID NO:2599; a light chain variable region CDR2 comprising SEQ ID NO:2600; and a light chain variable region CDR3 comprising SEQ ID NO:2601; b) a heavy chain variable region CDR1 comprising SEQ ID NO:2626; a heavy chain variable region CDR2 comprising SEQ ID NO:2624; a heavy chain variable region CDR3 comprising SEQ ID NO:2625; a light chain variable region CDR1 comprising SEQ ID NO:2636; a light chain variable region CDR2 comprising, e.g., consisting of SEQ ID NO:2637; and a light chain variable region CDR3 comprising SEQ ID NO:2638; c) a heavy chain variable region CDR1 comprising SEQ ID NO:2589; a heavy chain variable region CDR2 comprising SEQ ID NO:2587; a heavy chain variable region CDR3 comprising SEQ ID NO:2588; a light chain variable region CDR1 comprising SEQ ID NO:2599; a light chain variable region CDR2 comprising SEQ ID NO:2600; and a light chain variable region CDR3 comprising SEQ ID NO:2660; or d) a heavy chain variable region CDR1 comprising SEQ ID NO:2669; a heavy chain variable region CDR2 comprising SEQ ID NO:2667; a heavy chain variable region CDR3 comprising SEQ ID NO:2668; a light chain variable region CDR1 comprising SEQ ID NO:2679; a light chain variable region CDR2 comprising SEQ ID NO:2680; and a light chain variable region CDR3 comprising SEQ ID NO:2681.

[0497] In some embodiments, the antibody or antigen-binding fragment thereof comprises:

[0498] a) a heavy chain variable region CDR1 of SEQ ID NO:2590; a heavy chain variable region CDR2 comprising SEQ ID NO:2591; a heavy chain variable region CDR3 comprising SEQ ID NO:2588; a light chain variable region CDR1 comprising SEQ ID NO:2602; a light chain variable region CDR2 comprising SEQ ID NO:2603; and a light chain variable region CDR3 comprising SEQ ID NO:2604;

[0499] b) a heavy chain variable region CDR1 comprising SEQ ID NO:2627; a heavy chain variable region CDR2 comprising SEQ ID NO:2628; a heavy chain variable region CDR3 comprising SEQ ID NO:2625; a light chain variable region CDR1 comprising SEQ ID NO:2639; a light chain variable region CDR2 comprising SEQ ID NO:2640; and a light chain variable region CDR3 comprising SEQ ID NO:2641;

[0500] c) a heavy chain variable region CDR1 comprising SEQ ID NO:2590; a heavy chain variable region CDR2 comprising SEQ ID NO:2591; a heavy chain variable region CDR3 comprising SEQ ID NO:2588; a light chain variable region CDR1 comprising SEQ ID NO:2602; a light chain variable region CDR2 comprising SEQ ID NO:2603; and a light chain variable region CDR3 comprising SEQ ID NO:2661; or

[0501] d) a heavy chain variable region CDR1 comprising SEQ ID NO:2670; a heavy chain variable region CDR2 comprising SEQ ID NO:2671; a heavy chain variable region CDR3 comprising SEQ ID NO:2668; a light chain variable region CDR1 comprising SEQ ID NO:2682; a light chain variable region CDR2 comprising SEQ ID NO:2683; and a light chain variable region CDR3 comprising SEQ ID NO:2684.

[0502] In some embodiments, the antibody or antigen-binding fragment thereof comprises:

[0503] a) a heavy chain variable region CDR1 comprising SEQ ID NO:2592; a heavy chain variable region CDR2 comprising SEQ ID NO:2593; a heavy chain variable region CDR3 comprising SEQ ID NO:2594; a light chain variable region CDR1 comprising SEQ ID NO:2605; a light chain variable region CDR2 comprising SEQ ID NO:2603; and a light chain variable region CDR3 comprising SEQ ID NO:2601;

[0504] b) a heavy chain variable region CDR1 comprising SEQ ID NO:2629; a heavy chain variable region CDR2 comprising SEQ ID NO:2630; a heavy chain variable region CDR3 comprising SEQ ID NO:2631; a light chain variable region CDR1 comprising SEQ ID NO:2642; a light chain variable region CDR2 comprising SEQ ID NO:2640; and a light chain variable region CDR3 comprising SEQ ID NO:2638;

[0505] c) a heavy chain variable region CDR1 comprising SEQ ID NO:2592; a heavy chain variable region CDR2 comprising SEQ ID NO:2593; a heavy chain variable region CDR3 comprising SEQ ID NO:2594; a light chain variable region CDR1 comprising SEQ ID NO:2605; a light chain variable region CDR2 comprising SEQ ID NO:2603; and a light chain variable region CDR3 comprising SEQ ID NO:2660; or

[0506] d) a heavy chain variable region CDR1 comprising SEQ ID NO:2672; a heavy chain variable region CDR2 comprising SEQ ID NO:2673; a heavy chain variable region CDR3 comprising SEQ ID NO:2674; a light chain variable region CDR1 comprising SEQ ID NO:2685; a light chain variable region CDR2 comprising SEQ ID NO:2683; and a light chain variable region CDR3 comprising SEQ ID NO:2681.

[0507] In some embodiments, the antibody or antigen-binding fragment thereof comprises:

[0508] a) a heavy chain variable region CDR1 comprising SEQ ID NO:2586; a heavy chain variable region CDR2 comprising SEQ ID NO:2587; a heavy chain variable region CDR3 comprising SEQ ID NO:2588; a light chain variable region CDR1 comprising SEQ ID NO:2599; a light chain variable region CDR2 comprising SEQ ID NO:2600; and a light chain variable region CDR3 comprising SEQ ID NO:2601;

[0509] b) a heavy chain variable region CDR1 comprising SEQ ID NO:2623; a heavy chain variable region CDR2 comprising SEQ ID NO:2624; a heavy chain variable region CDR3 comprising SEQ ID NO:2625; a light chain variable region CDR1 comprising SEQ ID NO:2636; a light chain variable region CDR2 comprising SEQ ID NO:2637; and a light chain variable region CDR3 comprising SEQ ID NO:2638;

[0510] c) a heavy chain variable region CDR1 comprising SEQ ID NO:2586; a heavy chain variable region CDR2 comprising SEQ ID NO:2587; a heavy chain variable region CDR3 comprising SEQ ID NO:2588; a light chain variable region CDR1 comprising SEQ ID NO:2599; a light chain variable region CDR2 comprising SEQ ID NO:2600; and a light chain variable region CDR3 comprising SEQ ID NO:2660; or

[0511] d) a heavy chain variable region CDR1 comprising SEQ ID NO:2666; a heavy chain variable region CDR2 comprising SEQ ID NO:2667; a heavy chain variable region CDR3 comprising SEQ ID NO:2668; a light chain variable region CDR1 comprising SEQ ID NO:2679; a light chain variable region CDR2 comprising SEQ ID NO:2680; and a light chain variable region CDR3 comprising SEQ ID NO:2681.

[0512] In some embodiments, the antibody or antigen-binding fragment thereof comprises:

[0513] a) a VH comprising SEQ ID NO:2595 and a VL comprising SEQ ID NO:2606; or

[0514] b) a VH comprising SEQ ID NO:2632 and a VL comprising SEQ ID NO:2643; or

[0515] c) a VH comprising a sequence having at least 95% homology to SEQ ID NO:2595 and a VL comprising a sequence having at least 95% homology to SEQ ID NO:2606; or

[0516] d) a VH comprising a sequence having at least 95% homology to SEQ ID NO:2632 and a VL comprising a sequence having at least 95% homology to SEQ ID NO:2643; or

[0517] e) a VH comprising, e.g. consisting of, a sequence that differs by at least 1, 2, 3, 4, 5, or 6 amino acids from SEQ ID NO:2595 and a VL comprising, e.g. consisting of, a sequence that differs by at least 1, 2, 3, 4, 5, or 6 amino acids from SEQ ID NO:2606; or

[0518] f) a VH comprising, e.g. consisting of, a sequence that differs by at least 1, 2, 3, 4, 5, or 6 amino acids from SEQ ID NO:2632 and a VL comprising, e.g. consisting of, a sequence that differs by at least 1, 2, 3, 4, 5, or 6 amino acids from SEQ ID NO:2643. g) a VH comprising SEQ ID NO:2595 and a VL comprising SEQ ID NO:2662; or

[0519] h) a VH comprising SEQ ID NO:2675 and a VL comprising SEQ ID NO:2686; or

[0520] i) a VH comprising a sequence having at least 95% homology to SEQ ID NO:2595 and a VL comprising a sequence having at least 95% homology to SEQ ID NO:2662; or

[0521] j) a VH comprising a sequence having at least 95% homology to SEQ ID NO:2675 and a VL comprising a sequence having at least 95% homology to SEQ ID NO:2686; or

[0522] k) a VH comprising, e.g. consisting of, a sequence that differs by at least 1, 2, 3, 4, 5, or 6 amino acids from SEQ ID NO:2595 and a VL comprising, e.g. consisting of, a sequence that differs by at least 1, 2, 3, 4, 5, or 6 amino acids from SEQ ID NO:2662; or

[0523] l) a VH comprising, e.g. consisting of, a sequence that differs by at least 1, 2, 3, 4, 5, or 6 amino acids from SEQ ID NO:2675 and a VL comprising, e.g. consisting of, a sequence that differs by at least 1, 2, 3, 4, 5, or 6 amino acids from SEQ ID NO:2686.

[0524] In some embodiments, the antibody or antigen-binding fragment thereof comprises:

[0525] a) a heavy chain amino acid sequence comprising SEQ ID NO:2597, SEQ ID NO:2611, SEQ ID NO:2615, SEQ ID NO:2617, SEQ ID NO:2619, or SEQ ID NO:2621, and a light chain amino acid sequence comprising SEQ ID NO:2608; b) a heavy chain amino acid sequence comprising SEQ ID NO:2634, SEQ ID NO:2648, SEQ ID NO:2652, SEQ ID NO:2654, SEQ ID NO:2656, or SEQ ID NO:2658, and a light chain amino acid sequence comprising SEQ ID NO:2645; c) a heavy chain amino acid sequence having at least 95% sequence identity to SEQ ID NO:2597, SEQ ID NO:2611, SEQ ID NO:2615, SEQ ID NO:2617, SEQ ID NO:2619, or SEQ ID NO:2621, and a light chain amino acid sequence having at least 95% sequence identity to SEQ ID NO:2608;

[0526] d) a heavy chain amino acid sequence having at least 95% sequence identity to SEQ ID NO:2634, SEQ ID NO:2648, SEQ ID NO:2652, SEQ ID NO:2654, SEQ ID NO:2656, or SEQ ID NO:2658, and a light chain amino acid sequence having at least 95% sequence identity to SEQ ID NO:2645;

[0527] e) a heavy chain amino acid sequence comprising SEQ ID NO:2597, and a light chain amino acid sequence comprising SEQ ID NO:2664;

[0528] f) a heavy chain amino acid sequence comprising SEQ ID NO:2677, and a light chain amino acid sequence comprising SEQ ID NO:2688;

[0529] g) a heavy chain amino acid sequence having at least 95% sequence identity to SEQ ID NO:2597, and a light chain amino acid sequence having at least 95% sequence identity to SEQ ID NO:2664; or

[0530] h) a heavy chain amino acid sequence having at least 95% sequence identity to SEQ ID NO:2677, and a light chain amino acid sequence having at least 95% sequence identity to SEQ ID NO:2688.

[0531] In some embodiments, the antibody or antigen-binding fragment thereof comprises:

[0532] a) a heavy chain sequence comprising SEQ ID NO:2597 and a light chain sequence comprising SEQ ID NO:2608;

[0533] b) a heavy chain sequence comprising SEQ ID NO:2611 and a light chain sequence comprising SEQ ID NO:2608;

[0534] c) a heavy chain sequence comprising SEQ ID NO:2615 and a light chain sequence comprising SEQ ID NO:2608;

[0535] d) a heavy chain sequence comprising SEQ ID NO:2617 and a light chain sequence comprising SEQ ID NO:2608;

[0536] e) a heavy chain sequence comprising SEQ ID NO:2619 and a light chain sequence comprising SEQ ID NO:2608;

[0537] f) a heavy chain sequence comprising SEQ ID NO:2621 and a light chain sequence comprising SEQ ID NO:2608;

[0538] g) a heavy chain sequence comprising SEQ ID NO:2634 and a light chain sequence comprising SEQ ID NO:2645;

[0539] h) a heavy chain sequence comprising SEQ ID NO:2648 and light chain sequence comprising SEQ ID NO:2645;

[0540] i) a heavy chain sequence comprising SEQ ID NO:2652 and light chain sequence comprising SEQ ID NO:2645;

[0541] j) a heavy chain sequence comprising SEQ ID NO:2654 and light chain sequence comprising SEQ ID NO:2645;

[0542] k) a heavy chain sequence comprising SEQ ID NO:2656 and light chain sequence comprising SEQ ID NO:2645;

[0543] l) a heavy chain sequence comprising SEQ ID NO:2658 and light chain sequence comprising SEQ ID NO:2645;

[0544] m) a heavy chain sequence comprising SEQ ID NO:2597 and light chain sequence comprising SEQ ID NO:2664; or

[0545] n) a heavy chain sequence comprising SEQ ID NO:2677 and light chain sequence comprising SEQ ID NO:2688.

[0546] In some embodiments, the antibody is an antibody disclosed in Table 1 of PCT Patent Application Publication No. WO2020/079580A1, reproduced below as TABLE J1.

TABLE J1
Sequences of Exemplary Monoclonal Antibodies That Bind Human TREM2

| | |
|---|---|
| Description | Sequence |

MOR44698A

| | |
|---|---|
| HCDR1 | GYTFTGYHMS (SEQ ID NO: 2586) |
| (Combined) | |
| HCDR2 | VINPVSGNTVYAQKFQG (SEQ ID NO: 2587) |
| (Combined) | |
| HCDR3 | IPSYTYAFDY (SEQ ID NO: 2588) |
| (Combined) | |
| HCDR1 | GYHMS (SEQ ID NO: 2589) |
| (Kabat) | |
| HCDR2 | VINPVSGNTVYAQKFQG (SEQ ID NO: 2587) |
| (Kabat) | |
| HCDR3 | IPSYTYAFDY (SEQ ID NO: 2588) |
| (Kabat) | |
| HCDR1 | GYTFTGY (SEQ ID NO: 2590) |
| (Chothia) | |
| HCDR2 | NPVSGN (SEQ ID NO: 2591) |
| (Chothia) | |
| HCDR3 | IPSYTYAFDY (SEQ ID NO: 2588) |
| (Chothia) | |
| HCDR1 | GYTFTGYH (SEQ ID NO: 2592) |
| (IMGT) | |
| HCDR2 | INPVSGNT (SEQ ID NO: 2593) |
| (IMGT) | |
| HCDR3 | ARIPSYTYAFDY (SEQ ID NO: 2594) |
| (IMGT) | |
| VH | QVQLVQSGAEVKKPGASVKVSCKASGYTFTGYHMSWVRQAPGQGLEWMGV |
| | INPVSGNTVYAQKFQGRVTMTRDTSISTAYMELSRLRSEDTAVYYCARIPSYT |
| | YAFDYWGQGTLVTVSS (SEQ ID NO: 2595) |
| DNA VH | CAGGTGCAATTGGTGCAGAGCGGTGCGGAAGTGAAAAAACCGGGTGCCAG |
| | CGTGAAAGTTAGCTGCAAAGCGTCCGGATATACCTTCACTGGTTACCATAT |
| | GTCTTGGGTGCGCCAGGCCCCGGGCCAGGGCCTCGAGTGGATGGGCGTTAT |
| | CAACCCGGTTTCTGGCAACACGGTTTACGCGCAGAAATTTCAGGGCCGGGT |
| | GACCATGACCCGTGATACCAGCATTAGCACCGCGTATATGGAACTGAGCC |
| | GTCTGCGTAGCGAAGATACGGCCGTGTATTATTGCGCGCGTATCCCGTCTT |
| | ACACTTACGCTTTCGATTACTGGGGCCAAGGCACCCTGGTGACTGTTAGCT |
| | CA (SEQ ID NO: 2596) |
| Heavy Chain | QVQLVQSGAEVKKPGASVKVSCKASGYTFTGYHMSWVRQAPGQGLEWMGV |
| | INPVSGNTVYAQKFQGRVTMTRDTSISTAYMELSRLRSEDTAVYYCARIPSYT |
| | YAFDYWGQGTLVTVSSASTKGPSVFPLAPSSKSTSGGTAALGCLVKDYFPEPV |
| | TVSWNSGALTSGVHTFPAVLQSSGLYSLSSVVTVPSSSLGTQTYICNVNHKPSN |
| | TKVDKRVEPKSCDKTHTCPPCPAPEAAGGPSVFLFPPKPKDTLMISRTPEVTCV |
| | VVDVSHEDPEVKFNWYVDGVEVHNAKTKPREEQYNSTYRVVSVLTVLHQD |
| | WLNGKEYKCKVSNKALPAPIEKTISKAKGQPREPQVYTLPPSREEMTKNQVSL |
| | TCLVKGFYPSDIAVEWESNGQPENNYKTTPPVLDSDGSFFLYSKLTVDKSRWQ |
| | QGNVFSCSVMHEALHNHYTQKSLSLSPGK (SEQ ID NO: 2597) |
| DNA Heavy | CAGGTGCAATTGGTGCAGAGCGGTGCGGAAGTGAAAAAACCGGGTGCCAG |
| Chain | CGTGAAAGTTAGCTGCAAAGCGTCCGGATATACCTTCACTGGTTACCATAT |
| | GTCTTGGGTGCGCCAGGCCCCGGGCCAGGGCCTCGAGTGGATGGGCGTTAT |
| | CAACCCGGTTTCTGGCAACACGGTTTACGCGCAGAAATTTCAGGGCCGGGT |
| | GACCATGACCCGTGATACCAGCATTAGCACCGCGTATATGGAACTGAGCC |
| | GTCTGCGTAGCGAAGATACGGCCGTGTATTATTGCGCGCGTATCCCGTCTT |
| | ACACTTACGCTTTCGATTACTGGGGCCAAGGCACCCTGGTGACTGTTAGCT |
| | CAGCCTCCACCAAGGGTCCATCGGTCTTCCCCCTGGCACCCTCCTCCAAGA |
| | GCACCTCTGGGGGCACAGCGGCCCTGGGCTGCCTGGTCAAGGACTACTTCC |
| | CCGAACCGGTGACGGTGTCGTGGAACTCAGGCGCCCTGACCAGCGGCGTG |
| | CACACCTTCCCGGCTGTCCTACAGTCCTCAGGACTCTACTCCCTCAGCAGC |
| | GTGGTGACCGTGCCCTCCAGCAGCTTGGGCACCCAGACCTACATCTGCAAC |
| | GTGAATCACAAGCCCAGCAACACCAAGGTGGACAAGAGAGTTGAGCCCAA |
| | ATCTTGTGACAAAACTCACACATGCCCACCGTGCCCAGCACCTGAAGCAGC |
| | GGGGGGACCGTCAGTCTTCCTCTTCCCCCCAAAACCCAAGGACACCCTCAT |
| | GATCTCCCGGACCCCTGAGGTCACATGCGTGGTGGTGGACGTGAGCCACG |
| | AAGACCCTGAGGTCAAGTTCAACTGGTACGTGGACGGCGTGGAGGTGCAT |
| | AATGCCAAGACAAAGCCGCGGGAGGAGCAGTACAACAGCACGTACCGGGT |
| | GGTCAGCGTCCTCACCGTCCTGCACCAGGACTGGCTGAATGGCAAGGAGT |
| | ACAAGTGCAAGGTCTCCAACAAAGCCCTCCCAGCCCCCATCGAGAAAACC |
| | ATCTCCAAAGCCAAAGGGCAGCCCCGAGAACCACAGGTGTACACCCTGCC |
| | CCCATCCCGGGAGGAGATGACCAAGAACCAGGTCAGCCTGACCTGCCTGG |
| | TCAAAGGCTTCTATCCCAGCGACATCGCCGTGGAGTGGGAGAGCAATGGG |
| | CAGCCGGAGAACAACTACAAGACCACGCCTCCCGTGCTGGACTCCGACGG |
| | CTCCTTCTTCCTCTACAGCAAGCTCACCGTGGACAAGAGCAGGTGGCAGCA |
| | GGGGAACGTCTTCTCATGCTCCGTGATGCATGAGGCTCTGCACAACCACTA |
| | CACGCAGAAGAGCCTCTCCCTGTCTCCGGGTAAA (SEQ ID NO: 2598) |
| LCDR1 | RASQDISNYLA (SEQ ID NO: 2599) |
| (Combined) | |
| LCDR2 | RASSLQS (SEQ ID NO: 2600) |
| (Combined) | |
| LCDR3 | FQYRHMPSQT (SEQ ID NO: 2601) |
| (Combined) | |
| LCDR1 | RASQDISNYLA (SEQ ID NO: 2599) |
| (Kabat) | |
| LCDR2 | RASSLQS (SEQ ID NO: 2600) |
| (Kabat) | |
| LCDR3 | FQYRHMPSQT (SEQ ID NO: 2601) |
| (Kabat) | |
| LCDR1 | SQDISNY (SEQ ID NO: 2602) |
| (Chothia) | |
| LCDR2 | RAS (SEQ ID NO: 2603) |
| (Chothia) | |
| LCDR3 | YRHMPSQ (SEQ ID NO: 2604) |
| (Chothia) | |
| LCDR1 | QDISNY (SEQ ID NO: 2605) |
| (IMGT) | |
| LCDR2 | RAS (SEQ ID NO: 2603) |
| (IMGT) | |
| LCDR3 | FQYRHMPSQT (SEQ ID NO: 2601) |
| (IMGT) | |
| VL | DIQMTQSPSSLSASVGDRVTITCRASQDISNYLAWYQQKPGKAPKLLIYRASSL |
| | QSGVPSRFSGSGSGTDFTLTISSLQPEDFATYYCFQYRHMPSQTFGQGTKVEIK |
| | (SEQ ID NO: 2606) |
| DNA VL | GATATCCAGATGACCCAGAGCCCGAGCAGCCTGAGCGCCAGCGTGGGCGA |
| | TCGCGTGACCATTACCTGCAGAGCCAGCCAGGACATTTCTAACTACCTGGC |
| | TTGGTACCAGCAGAAACCGGGCAAAGCGCCGAAACTATTAATCTACCGTG |
| | CTTCTTCTCTGCAAAGCGGCGTGCCGAGCCGCTTTAGCGGCAGCGGATCCG |
| | GCACCGATTTCACCCTGACCATTAGCTCTCTGCAACCGGAAGACTTTGCGA |
| | CCTATTATTGCTTCCAGTACCGTCATATGCCGTCTCAGACCTTTGGCCAGGG |
| | CACGAAAGTTGAAATTAAA (SEQ ID NO: 2607) |
| Light Chain | DIQMTQSPSSLSASVGDRVTITCRASQDISNYLAWYQQKPGKAPKLLIYRASSL |
| | QSGVPSRFSGSGSGTDFTLTISSLQPEDFATYYCFQYRHMPSQTFGQGTKVEIK |
| | RTVAAPSVFIFPPSDEQLKSGTASVVCLLNNFYPREAKVQWKVDNALQSGNSQ |
| | ESVTEQDSKDSTYSLSSTLTLSKADYEKHKVYACEVTHQGLSSPVTKSFNRGE |
| | C (SEQ ID NO: 2608) |
| DNA Light | GATATCCAGATGACCCAGAGCCCGAGCAGCCTGAGCGCCAGCGTGGGCGA |
| Chain | TCGCGTGACCATTACCTGCAGAGCCAGCCAGGACATTTCTAACTACCTGGC |
| | TTGGTACCAGCAGAAACCGGGCAAAGCGCCGAAACTATTAATCTACCGTG |
| | CTTCTTCTCTGCAAAGCGGCGTGCCGAGCCGCTTTAGCGGCAGCGGATCCG |
| | GCACCGATTTCACCCTGACCATTAGCTCTCTGCAACCGGAAGACTTTGCGA |
| | CCTATTATTGCTTCCAGTACCGTCATATGCCGTCTCAGACCTTTGGCCAGGG |
| | CACGAAAGTTGAAATTAAACGTACGGTGGCCGCTCCCAGCGTGTTCATCTT |
| | CCCCCCCAGCGACGAGCAGCTGAAGAGCGGCACCGCCAGCGTGGTGTGCC |
| | TGCTGAACAACTTCTACCCCCGGGAGGCCAAGGTGCAGTGGAAGGTGGAC |
| | AACGCCCTGCAGAGCGGCAACAGCCAGGAAAGCGTCACCGAGCAGGACA |
| | GCAAGGACTCCACCTACAGCCTGAGCAGCACCCTGACCCTGAGCAAGGCC |
| | GACTACGAGAAGCACAAGGTGTACGCCTGCGAGGTGACCCACCAGGGCCT |
| | GTCCAGCCCCGTGACCAAGAGCTTCAACCGGGGCGAGTGT (SEQ ID NO: 2609) |

MOR44698B

| | |
|---|---|
| HCDR1 | GYTFTGYHMS (SEQ ID NO: 2586) |
| (Combined) | |
| HCDR2 | VINPVSGNTVYAQKFQG (SEQ ID NO: 2587) |
| (Combined) | |
| HCDR3 | IPSYTYAFDY (SEQ ID NO: 2588) |
| (Combined) | |
| HCDR1 | GYHMS (SEQ ID NO: 2589) |
| (Kabat) | |
| HCDR2 | VINPVSGNTVYAQKFQG (SEQ ID NO: 2587) |
| (Kabat) | |
| HCDR3 | IPSYTYAFDY (SEQ ID NO: 2588) |
| (Kabat) | |
| HCDR1 | GYTFTGY (SEQ ID NO: 2590) |
| (Chothia) | |
| HCDR2 | NPVSGN (SEQ ID NO: 2591) |
| (Chothia) | |
| HCDR3 | IPSYTYAFDY (SEQ ID NO: 2588) |
| (Chothia) | |
| HCDR1 | GYTFTGYH (SEQ ID NO: 2592) |
| (IMGT) | |
| HCDR2 | INPVSGNT (SEQ ID NO: 2593) |
| (IMGT) | |
| HCDR3 | ARIPSYTYAFDY (SEQ ID NO: 2594) |
| (IMGT) | |
| VH | QVQLVQSGAEVKKPGASVKVSCKASGYTFTGYHMSWVRQAPGQGLEWMGV |
| | INPVSGNTVYAQKFQGRVTMTRDTSISTAYMELSRLRSEDTAVYYCARIPSYT |
| | YAFDYWGQGTLVTVSS (SEQ ID NO: 2595) |
| DNA VH | CAAGTGCAACTCGTGCAGTCAGGAGCCGAAGTCAAGAAGCCTGGAGCCTC |
| | GGTCAAGGTGTCCTGCAAGGCCAGCGGATACACTTTCACTGGATACCACAT |
| | GTCGTGGGTCAGACAGGCTCCTGGCCAAGGGCTGGAGTGGATGGGCGTCA |
| | TCAACCCGGTGTCGGGTAATACCGTGTACGCCCAGAAGTTCCAGGGTCGCG |
| | TGACCATGACCCGGGATACCTCCATTAGCACCGCGTACATGGAGCTCAGCC |
| | GGTTGAGATCCGAGGATACCGCCGTGTACTACTGTGCGCGGATCCCGTCCT |
| | ACACTTACGCCTTCGACTATTGGGGCCAGGGGACTCTTGTCACCGTGTCCT |
| | CG (SEQ ID NO: 2610) |
| Heavy Chain | QVQLVQSGAEVKKPGASVKVSCKASGYTFTGYHMSWVRQAPGQGLEWMGV |
| | INPVSGNTVYAQKFQGRVTMTRDTSISTAYMELSRLRSEDTAVYYCARIPSYT |
| | YAFDYWGQGTLVTVSSASTKGPSVFPLAPSSKSTSGGTAALGCLVKDYFPEPV |
| | TVSWNSGALTSGVHTFPAVLQSSGLYSLSSVVTVPSSSLGTQTYICNVNHKPSN |
| | TKVDKRVEPKSCDKTHTCPPCPAPELLGGPSVFLFPPKPKDTLMISRTPEVTCV |
| | VVDVSHEDPEVKFNWYVDGVEVHNAKTKPREEQYNSTYRVVSVLTVLHQD |
| | WLNGKEYKCKVSNKALPAPIEKTISKAKGQPREPQVYTLPPSREEMTKNVSL |
| | TCLVKGFYPSDIAVEWESNGQPENNYKTTPPVLDSDGSFFLYSKLTVDKSRWQ |
| | QGNVFSCSVMHEALHNHYTQKSLSLSPGK (SEQ ID NO: 2611) |
| DNA Heavy | CAAGTGCAACTCGTGCAGTCAGGAGCCGAAGTCAAGAAGCCTGGAGCCTC |
| Chain | GGTCAAGGTGTCCTGCAAGGCCAGCGGATACACTTTCACTGGATACCACAT |
| | GTCGTGGGTCAGACAGGCTCCTGGCCAAGGGCTGGAGTGGATGGGCGTCA |
| | TCAACCCGGTGTCGGGTAATACCGTGTACGCCCAGAAGTTCCAGGGTCGCG |
| | TGACCATGACCCGGGATACCTCCATTAGCACCGCGTACATGGAGCTCAGCC |
| | GGTTGAGATCCGAGGATACCGCCGTGTACTACTGTGCGCGGATCCCGTCCT |
| | ACACTTACGCCTTCGACTATTGGGGCCAGGGGACTCTTGTCACCGTGTCCT |
| | CGGCCTCCACTAAGGGCCCAAGTGTGTTTCCCCTGGCCCCCAGCAGCAAGT |
| | CTACTTCCGGCGGAACTGCTGCCCTGGGTTGCCTGGTGAAGGACTACTTCC |
| | CCGAGCCCGTGACAGTGTCCTGGAACTCTGGGGCTCTGACTTCCGGCGTGC |
| | ACACCTTCCCCGCCGTGCTGCAGAGCAGCGGCCTGTACAGCCTGAGCAGCG |
| | TGGTGACAGTGCCCTCCAGCTCTCTGGGAACCCAGACCTATATCTGCAACG |
| | TGAACCACAAGCCCAGCAACACCAAGGTGGACAAGAGAGTGGAGCCCAA |
| | GAGCTGCGACAAGACCCACACCTGCCCCCCCTGCCCAGCTCCAGAACTGCT |
| | GGGAGGGCCTTCCGTGTTCCTGTTCCCCCCCAAGCCCAAGGACACCCTGAT |
| | GATCAGCAGGACCCCCGAGGTGACCTGCGTGGTGGTGGACGTGTCCCACG |
| | AGGACCCAGAGGTGAAGTTCAACTGGTACGTGGACGGCGTGGAGGTGCAC |
| | AACGCCAAGACCAAGCCCAGAGAGGAGCAGTACAACAGCACCTACAGGGT |
| | GGTGTCCGTGCTGACCGTGCTGCACCAGGACTGGCTGAACGGCAAAGAAT |
| | ACAAGTGCAAAGTCTCCAACAAGGCCCTGCCAGCCCCAATCGAAAAGACA |
| | ATCAGCAAGGCCAAGGGCCAGCCACGGGAGCCCCAGGTGTACACCCTGCC |
| | CCCCAGCCGGGAGGAGATGACCAAGAACCAGGTGTCCCTGACCTGTCTGG |
| | TGAAGGGCTTCTACCCCAGCGATATCGCCGTGGAGTGGGAGAGCAACGGC |
| | CAGCCCGAGAACAACTACAAGACCACCCCCCCAGTGCTGGACAGCGACGG |
| | CAGCTTCTTCCTGTACAGCAAGCTGACCGTGGACAAGTCCAGGTGGCAGCA |
| | GGGCAACGTGTTCAGCTGCAGCGTGATGCACGAGGCCCTGCACAACCACT |
| | ACACCCAGAAGTCCCTGAGCCTGAGCCCCGGCAAG (SEQ ID NO: 2612) |
| LCDR1 | RASQDISNYLA (SEQ ID NO: 2599) |
| (Combined) | |
| LCDR2 | RASSLQS (SEQ ID NO: 2600) |
| (Combined) | |
| LCDR3 | FQYRHMPSQT (SEQ ID NO: 2601) |
| (Combined) | |
| LCDR1 | RASQDISNYLA (SEQ ID NO: 2599) |
| (Kabat) | |
| LCDR2 | RASSLQS (SEQ ID NO: 2600) |
| (Kabat) | |
| LCDR3 | FQYRHMPSQT (SEQ ID NO: 2601) |
| (Kabat) | |
| LCDR1 | SQDISNY (SEQ ID NO: 2602) |
| (Chothia) | |
| LCDR2 | RAS (SEQ ID NO: 2603) |
| (Chothia) | |
| LCDR3 | YRHMPSQ (SEQ ID NO: 2604) |
| (Chothia) | |
| LCDR1 | QDISNY (SEQ ID NO: 2605) |
| (IMGT) | |
| LCDR2 | RAS (SEQ ID NO: 2603) |
| (IMGT) | |
| LCDR3 | FQYRHMPSQT (SEQ ID NO: 2601) |
| (IMGT) | |
| VL | DIQMTQSPSSLSASVGDRVTITCRASQDISNYLAWYQQKPGKAPKLLIYRASSL |
| | QSGVPSRFSGSGSGTDFTLTISSLQPEDFATYYCFQYRHMPSQTFGQGTKVEIK |
| | (SEQ ID NO: 2606) |
| DNA VL | GACATTCAGATGACCCAGTCCCCGTCGTCCCTGTCCGCATCCGTGGGCGAC |
| | AGAGTCACCATCACTTGCCGGGCCTCACAGGATATTTCCAACTACCTGGCC |
| | TGGTATCAGCAGAAGCCTGGAAAGGCCCCGAAGCTGCTGATCTACCGGGC |
| | GTCCTCCTTGCAATCGGGAGTGCCAAGCCGCTTTTCTGGTTCCGGGAGCGG |
| | GACTGACTTCACCCTGACTATTAGCAGCCTGCAGCCCGAAGATTTCGCTAC |
| | CTACTACTGCTTCCAGTACCGGCACATGCCCTCACAAACCTTCGGACAGGG |
| | CACCAAAGTCGAGATCAAG (SEQ ID NO: 2613) |
| Light Chain | DIQMTQSPSSLSASVGDRVTITCRASQDISNYLAWYQQKPGKAPKLLIYRASSL |
| | QSGVPSRFSGSGSGTDFTLTISSLQPEDFATYYCFQYRHMPSQTFGQGTKVEIK |
| | RTVAAPSVFIFPPSDEQLKSGTASVVCLLNNFYPREAKVQWKVDNALQSGNSQ |
| | ESVTEQDSKDSTYSLSSTLTLSKADYEKHKVYACEVTHQGLSSPVTKSFNRGE |
| | C (SEQ ID NO: 2608) |
| DNA Light | GACATTCAGATGACCCAGTCCCCGTCGTCCCTGTCCGCATCCGTGGGCGAC |
| Chain | AGAGTCACCATCACTTGCCGGGCCTCACAGGATATTTCCAACTACCTGGCC |
| | TGGTATCAGCAGAAGCCTGGAAAGGCCCCGAAGCTGCTGATCTACCGGGC |
| | GTCCTCCTTGCAATCGGGAGTGCCAAGCCGCTTTTCTGGTTCCGGGAGCGG |
| | GACTGACTTCACCCTGACTATTAGCAGCCTGCAGCCCGAAGATTTCGCTAC |
| | CTACTACTGCTTCCAGTACCGGCACATGCCCTCACAAACCTTCGGACAGGG |
| | CACCAAAGTCGAGATCAAGCGTACGGTGGCCGCTCCCAGCGTGTTCATCTT |
| | CCCCCCCAGCGACGAGCAGCTGAAGAGCGGCACCGCCAGCGTGGTGTGCC |
| | TGCTGAACAACTTCTACCCCCGGGAGGCCAAGGTGCAGTGGAAGGTGGAC |
| | AACGCCCTGCAGAGCGGCAACAGCCAGGAGAGCGTCACCGAGCAGGACA |
| | GCAAGGACTCCACCTACAGCCTGAGCAGCACCCTGACCCTGAGCAAGGCC |
| | GACTACGAGAAGCATAAGGTGTACGCCTGCGAGGTGACCCACCAGGGCCT |
| | GTCCAGCCCCGTGACCAAGAGCTTCAACAGGGGCGAGTGC (SEQ ID NO: 2614) |

MOR44698C

| | |
|---|---|
| HCDR1 | GYTFTGYHMS (SEQ ID NO: 2586) |
| (Combined) | |
| HCDR2 | VINPVSGNTVYAQKFQG (SEQ ID NO: 2587) |
| (Combined) | |
| HCDR3 | IPSYTYAFDY (SEQ ID NO: 2588) |
| (Combined) | |
| HCDR1 | GYHMS (SEQ ID NO: 2589) |
| (Kabat) | |
| HCDR2 | VINPVSGNTVYAQKFQG (SEQ ID NO: 2587) |
| (Kabat) | |
| HCDR3 | IPSYTYAFDY (SEQ ID NO: 2588) |
| (Kabat) | |
| HCDR1 | GYTFTGY (SEQ ID NO: 2590) |
| (Chothia) | |
| HCDR2 | NPVSGN (SEQ ID NO: 2591) |
| (Chothia) | |
| HCDR3 | IPSYTYAFDY (SEQ ID NO: 2588) |
| (Chothia) | |
| HCDR1 | GYTFTGYH (SEQ ID NO: 2592) |
| (IMGT) | |
| HCDR2 | INPVSGNT (SEQ ID NO: 2593) |
| (IMGT) | |
| HCDR3 | ARIPSYTYAFDY (SEQ ID NO: 2594) |
| (IMGT) | |
| VH | QVQLVQSGAEVKKPGASVKVSCKASGYTFTGYHMSWVRQAPGQGLEWMGV |
| | INPVSGNTVYAQKFQGRVTMTRDTSISTAYMELSRLRSEDTAVYYCARIPSYT |
| | YAFDYWGQGTLVTVSS (SEQ ID NO: 2595) |
| DNA VH | CAAGTGCAACTCGTGCAGTCAGGAGCCGAAGTCAAGAAGCCTGGAGCCTC |
| | GGTCAAGGTGTCCTGCAAGGCCAGCGGATACACTTTCACTGGATACCACAT |
| | GTCGTGGGTCAGACAGGCTCCTGGCCAAGGGCTGGAGTGGATGGGCGTCA |
| | TCAACCCGGTGTCGGGTAATACCGTGTACGCCCAGAAGTTCCAGGGTCGCG |
| | TGACCATGACCCGGGATACCTCCATTAGCACCGCGTACATGGAGCTCAGCC |
| | GGTTGAGATCCGAGGATACCGCCGTGTACTACTGTGCGCGGATCCCGTCCT |
| | ACACTTACGCCTTCGACTATTGGGGCCAGGGGACTCTTGTCACCGTGTCCT |
| | CG (SEQ ID NO: 2610) |
| Heavy Chain | QVQLVQSGAEVKKPGASVKVSCKASGYTFTGYHMSWVRQAPGQGLEWMGV |
| | INPVSGNTVYAQKFQGRVTMTRDTSISTAYMELSRLRSEDTAVYYCARIPSYT |
| | YAFDYWGQGTLVTVSSASTKGPSVFPLAPSSKSTSGGTAALGCLVKDYFPEPV |
| | TVSWNSGALTSGVHTFPAVLQSSGLYSLSSVVTVPSSSLGTQTYICNVNHKPSN |
| | TKVDKRVEPKSCDKTHTCPPCPAPELLGGPSVFLFPPKPKDTLMISRTPEVTCV |
| | VVAVSHEDPEVKFNWYVDGVEVHNAKTKPREEQYNSTYRVVSVLTVLHQD |
| | WLNGKEYKCKVSNKALAAPIEKTISKAKGQPREPQVYTLPPSREEMTKNQVSL |
| | TCLVKGFYPSDIAVEWESNGQPENNYKTTPPVLDSDGSFFLYSKLTVDKSRWQ |
| | QGNVFSCSVMHEALHNHYTQKSLSLSPGK (SEQ ID NO: 2615) |
| DNA Heavy | CAAGTGCAACTCGTGCAGTCAGGAGCCGAAGTCAAGAAGCCTGGAGCCTC |
| Chain | GGTCAAGGTGTCCTGCAAGGCCAGCGGATACACTTTCACTGGATACCACAT |
| | GTCGTGGGTCAGACAGGCTCCTGGCCAAGGGCTGGAGTGGATGGGCGTCA |
| | TCAACCCGGTGTCGGGTAATACCGTGTACGCCCAGAAGTTCCAGGGTCGCG |
| | TGACCATGACCCGGGATACCTCCATTAGCACCGCGTACATGGAGCTCAGCC |
| | GGTTGAGATCCGAGGATACCGCCGTGTACTACTGTGCGCGGATCCCGTCCT |
| | ACACTTACGCCTTCGACTATTGGGGCCAGGGGACTCTTGTCACCGTGTCCT |
| | CGGCCTCCACTAAGGGCCCGTCAGTGTTCCCCCTTGCGCCATCCTCGAAGT |
| | CAACCTCCGGAGGAACTGCCGCACTGGGTTGCCTCGTGAAAGACTATTTCC |
| | CGGAACCCGTCACTGTCTCCTGGAACTCAGGAGCGCTCACCAGCGGAGTGC |
| | ATACCTTTCCTGCGGTGCTGCAGTCCAGCGGCCTGTACTCCCTGAGCTCCGT |
| | CGTGACCGTCCCCTCGTCGTCCCTGGGAACCCAAACCTACATTTGCAACGT |
| | CAATCACAAGCCAAGCAACACTAAGGTGGACAAGAGAGTGGAGCCCAAGT |
| | CCTGCGATAAGACCCACACCTGTCCTCCCTGTCCGGCACCTGAACTGCTTG |
| | GTGGACCTTCCGTGTTCCTGTTCCCGCCCAAGCCAAAAGACACCCTGATGA |
| | TCTCCCGCACTCCGGAAGTCACTTGCGTGGTCGTGGCCGTGTCCCACGAGG |
| | ACCCCGAGGTCAAGTTTAATTGGTACGTGGACGGAGTGGAAGTGCACAAC |
| | GCCAAGACCAAGCCGCGGGAAGAACAGTACAACTCCACCTACCGCGTGGT |
| | GTCCGTCCTGACTGTGCTCCACCAGGACTGGCTGAACGGAAAGGAGTACA |
| | AGTGCAAAGTGTCCAACAAGGCACTGGCTGCCCCTATCGAAAAGACTATCT |
| | CCAAGGCCAAGGGCCAACCTAGGGAGCCCCAGGTGTACACGTTGCCTCCTT |
| | CCCGCGAAGAAATGACTAAGAACCAGGTGTCGCTGACCTGTCTCGTGAAA |
| | GGGTTCTACCCCTCTGACATCGCCGTGGAATGGGAGTCAAACGGACAGCCT |
| | GAGAACAACTATAAGACCACACCACCTGTCCTGGACTCCGACGGCTCCTTC |
| | TTCCTGTACTCAAAGTTGACCGTGGACAAGTCGCGGTGGCAACAGGGCAAC |
| | GTGTTCTCTTGCTCCGTGATGCACGAAGCCCTGCACAACCACTACACCCAA |
| | AAGTCGCTCAGCCTCTCCCCCGGAAAG (SEQ ID NO: 2616) |
| LCDR1 | RASQDISNYLA (SEQ ID NO: 2599) |
| (Combined) | |
| LCDR2 | RASSLQS (SEQ ID NO: 2600) |
| (Combined) | |
| LCDR3 | FQYRHMPSQT (SEQ ID NO: 2601) |
| (Combined) | |
| LCDR1 | RASQDISNYLA (SEQ ID NO: 2599) |
| (Kabat) | |
| LCDR2 | RASSLQS (SEQ ID NO: 2600) |
| (Kabat) | |
| LCDR3 | FQYRHMPSQT (SEQ ID NO: 2601) |
| (Kabat) | |
| LCDR1 | SQDISNY (SEQ ID NO: 2602) |
| (Chothia) | |
| LCDR2 | RAS (SEQ ID NO: 2603) |
| (Chothia) | |
| LCDR3 | YRHMPSQ (SEQ ID NO: 2604) |
| (Chothia) | |
| LCDR1 | QDISNY (SEQ ID NO: 2605) |
| (IMGT) | |
| LCDR2 | RAS (SEQ ID NO: 2603) |
| (IMGT) | |
| LCDR3 | FQYRHMPSQT (SEQ ID NO: 2601) |
| (IMGT) | |
| VL | DIQMTQSPSSLSASVGDRVTITCRASQDISNYLAWYQQKPGKAPKLLIYRASSL |
| | QSGVPSRFSGSGSGTDFTLTISSLQPEDFATYYCFQYRHMPSQTFGQGTKVEIK |
| | (SEQ ID NO: 2606) |
| DNA VL | GACATTCAGATGACCCAGTCCCCGTCGTCCCTGTCCGCATCCGTGGGCGAC |
| | AGAGTCACCATCACTTGCCGGGCCTCACAGGATATTTCCAACTACCTGGCC |
| | TGGTATCAGCAGAAGCCTGGAAAGGCCCCGAAGCTGCTGATCTACCGGGC |
| | GTCCTCCTTGCAATCGGGAGTGCCAAGCCGCTTTTCTGGTTCCGGGAGCGG |
| | GACTGACTTCACCCTGACTATTAGCAGCCTGCAGCCCGAAGATTTCGCTAC |
| | CTACTACTGCTTCCAGTACCGGCACATGCCCTCACAAACCTTCGGACAGGG |
| | CACCAAAGTCGAGATCAAG (SEQ ID NO: 2613) |
| Light Chain | DIQMTQSPSSLSASVGDRVTITCRASQDISNYLAWYQQKPGKAPKLLIYRASSL |
| | QSGVPSRFSGSGSGTDFTLTISSLQPEDFATYYCFQYRHMPSQTFGQGTKVEIK |
| | RTVAAPSVFIFPPSDEQLKSGTASVVCLLNNFYPREAKVQWKVDNALQSGNSQ |
| | ESVTEQDSKDSTYSLSSTLTLSKADYEKHKVYACEVTHQGLSSPVTKSFNRGE |
| | C (SEQ ID NO: 2608) |
| DNA Light | GACATTCAGATGACCCAGTCCCCGTCGTCCCTGTCCGCATCCGTGGGCGAC |
| Chain | AGAGTCACCATCACTTGCCGGGCCTCACAGGATATTTCCAACTACCTGGCC |
| | TGGTATCAGCAGAAGCCTGGAAAGGCCCCGAAGCTGCTGATCTACCGGGC |
| | GTCCTCCTTGCAATCGGGAGTGCCAAGCCGCTTTTCTGGTTCCGGGAGCGG |
| | GACTGACTTCACCCTGACTATTAGCAGCCTGCAGCCCGAAGATTTCGCTAC |
| | CTACTACTGCTTCCAGTACCGGCACATGCCCTCACAAACCTTCGGACAGGG |
| | CACCAAAGTCGAGATCAAGCGTACGGTGGCCGCTCCCAGCGTGTTCATCTT |
| | CCCCCCCAGCGACGAGCAGCTGAAGAGCGGCACCGCCAGCGTGGTGTGCC |
| | TGCTGAACAACTTCTACCCCCGGGAGGCCAAGGTGCAGTGGAAGGTGGAC |
| | AACGCCCTGCAGAGCGGCAACAGCCAGGAGAGCGTCACCGAGCAGGACA |
| | GCAAGGACTCCACCTACAGCCTGAGCAGCACCCTGACCCTGAGCAAGGCC |
| | GACTACGAGAAGCATAAGGTGTACGCCTGCGAGGTGACCCACCAGGGCCT |
| | GTCCAGCCCCGTGACCAAGAGCTTCAACAGGGGCGAGTGC (SEQ ID NO: 2614) |

MOR44698D

| | |
|---|---|
| HCDR1 | GYTFTGYHMS (SEQ ID NO: 2586) |
| (Combined) | |
| HCDR2 | VINPVSGNTVYAQKFQG (SEQ ID NO: 2587) |
| (Combined) | |
| HCDR3 | IPSYTYAFDY (SEQ ID NO: 2588) |
| (Combined) | |
| HCDR1 | GYHMS (SEQ ID NO: 2589) |
| (Kabat) | |
| HCDR2 | VINPVSGNTVYAQKFQG (SEQ ID NO: 2587) |
| (Kabat) | |
| HCDR3 | IPSYTYAFDY (SEQ ID NO: 2588) |
| (Kabat) | |
| HCDR1 | GYTFTGY (SEQ ID NO: 2590) |
| (Chothia) | |
| HCDR2 | NPVSGN (SEQ ID NO: 2591) |
| (Chothia) | |
| HCDR3 | IPSYTYAFDY (SEQ ID NO: 2588) |
| (Chothia) | |
| HCDR1 | GYTFTGYH (SEQ ID NO: 2592) |
| (IMGT) | |
| HCDR2 | INPVSGNT (SEQ ID NO: 2593) |
| (IMGT) | |
| HCDR3 | ARIPSYTYAFDY (SEQ ID NO: 2594) |
| (IMGT) | |
| VH | QVQLVQSGAEVKKPGASVKVSCKASGYTFTGYHMSWVRQAPGQGLEWMGV |
| | INPVSGNTVYAQKFQGRVTMTRDTSISTAYMELSRLRSEDTAVYYCARIPSYT |
| | YAFDYWGQGTLVTVSS (SEQ ID NO: 2595) |
| DNA VH | CAAGTGCAACTCGTGCAGTCAGGAGCCGAAGTCAAGAAGCCTGGAGCCTC |
| | GGTCAAGGTGTCCTGCAAGGCCAGCGGATACACTTTCACTGGATACCACAT |
| | GTCGTGGGTCAGACAGGCTCCTGGCCAAGGGCTGGAGTGGATGGGCGTCA |
| | TCAACCCGGTGTCGGGTAATACCGTGTACGCCCAGAAGTTCCAGGGTCGCG |
| | TGACCATGACCCGGGATACCTCCATTAGCACCGCGTACATGGAGCTCAGCC |
| | GGTTGAGATCCGAGGATACCGCCGTGTACTACTGTGCGCGGATCCCGTCCT |
| | ACACTTACGCCTTCGACTATTGGGGCCAGGGGACTCTTGTCACCGTGTCCT |
| | CG (SEQ ID NO: 2610) |
| Heavy Chain | QVQLVQSGAEVKKPGASVKVSCKASGYTFTGYHMSWVRQAPGQGLEWMGV |
| | INPVSGNTVYAQKFQGRVTMTRDTSISTAYMELSRLRSEDTAVYYCARIPSYT |
| | YAFDYWGQGTLVTVSSASTKGPSVFPLAPSSKSTSGGTAALGCLVKDYFPEPV |
| | TVSWNSGALTSGVHTFPAVLQSSGLYSLSSVVTVPSSSLGTQTYICNVNHKPSN |
| | TKVDKRVEPKSCDKTHTCPPCPAPELLGGPSVFLFPPKPKDTLMISRTPEVTCV |
| | VVDVSHEDPEVKFNWYVDGVEVHNAKTKPREEQYNSTYRVVSVLTVLHQD |
| | WLNGKEYKCKVSNKALPAPIEKTISKAKGQPREPQVYTLPPSREEMTKNQVSL |
| | TCLVKGFYPSDIAVEWESNGQPENNYKTTPPVLDSDGSFFLYSKLTVDKSRWQ |
| | QGNVFSCSVLHEALHSHYTQKSLSLSPGK (SEQ ID NO: 2617) |
| DNA Heavy | CAAGTGCAACTCGTGCAGTCAGGAGCCGAAGTCAAGAAGCCTGGAGCCTC |
| Chain | GGTCAAGGTGTCCTGCAAGGCCAGCGGATACACTTTCACTGGATACCACAT |
| | GTCGTGGGTCAGACAGGCTCCTGGCCAAGGGCTGGAGTGGATGGGCGTCA |
| | TCAACCCGGTGTCGGGTAATACCGTGTACGCCCAGAAGTTCCAGGGTCGCG |
| | TGACCATGACCCGGGATACCTCCATTAGCACCGCGTACATGGAGCTCAGCC |
| | GGTTGAGATCCGAGGATACCGCCGTGTACTACTGTGCGCGGATCCCGTCCT |
| | ACACTTACGCCTTCGACTATTGGGGCCAGGGGACTCTTGTCACCGTGTCCT |
| | CGGCCTCCACTAAGGGCCCGTCAGTGTTCCCCCTTGCGCCATCCTCGAAGT |
| | CAACCTCCGGAGGAACTGCCGCACTGGGTTGCCTCGTGAAAGACTATTTCC |
| | CGGAACCCGTCACTGTCTCCTGGAACTCAGGAGCGCTCACCAGCGGAGTGC |
| | ATACCTTTCCTGCGGTGCTGCAGTCCAGCGGCCTGTACTCCCTGAGCTCCGT |
| | CGTGACCGTCCCCTCGTCGTCCCTGGGAACCCAAACCTACATTTGCAACGT |
| | CAATCACAAGCCAAGCAACACTAAGGTGGACAAGAGAGTGGAGCCCAAGT |
| | CCTGCGATAAGACCCACACCTGTCCTCCCTGTCCGGCACCTGAACTGCTTG |
| | GTGGACCTTCCGTGTTCCTGTTCCCGCCCAAGCCAAAAGACACCCTGATGA |
| | TCTCCCGCACTCCGGAAGTCACTTGCGTGGTCGTGGACGTGTCCCACGAGG |
| | ACCCCGAGGTCAAGTTTAATTGGTACGTGGACGGAGTGGAAGTGCACAAC |
| | GCCAAGACCAAGCCGCGGGAAGAACAGTACAACTCCACCTACCGCGTGGT |
| | GTCCGTCCTGACTGTGCTCCACCAGGACTGGCTGAACGGAAAGGAGTACA |
| | AGTGCAAAGTGTCCAACAAGGCACTGCCAGCCCCTATCGAAAAGACTATC |
| | TCCAAGGCCAAGGGCCAACCTAGGGAGCCCCAGGTGTACACGTTGCCTCCT |
| | TCCCGCGAAGAAATGACTAAGAACCAGGTGTCGCTGACCTGTCTCGTGAAA |
| | GGGTTCTACCCCTCTGACATCGCCGTGGAATGGGAGTCAAACGGACAGCCT |
| | GAGAACAACTATAAGACCACACCACCTGTCCTGGACTCCGACGGCTCCTTC |
| | TTCCTGTACTCAAAGTTGACCGTGGACAAGTCGCGGTGGCAACAGGGCAAC |
| | GTGTTCTCTTGCTCCGTGCTGCACGAAGCCCTGCACAGCCACTACACCCAA |
| | AAGTCGCTCAGCCTCTCCCCCGGAAAG (SEQ ID NO: 2618) |
| LCDR1 | RASQDISNYLA (SEQ ID NO: 2599) |
| (Combined) | |
| LCDR2 | RASSLQS (SEQ ID NO: 2600) |
| (Combined) | |
| LCDR3 | FQYRHMPSQT (SEQ ID NO: 2601) |
| (Combined) | |
| LCDR1 | RASQDISNYLA (SEQ ID NO: 2599) |
| (Kabat) | |
| LCDR2 | RASSLQS (SEQ ID NO: 2600) |
| (Kabat) | |
| LCDR3 | FQYRHMPSQT (SEQ ID NO: 2601) |
| (Kabat) | |
| LCDR1 | SQDISNY (SEQ ID NO: 2602) |
| (Chothia) | |
| LCDR2 | RAS (SEQ ID NO: 2603) |
| (Chothia) | |
| LCDR3 | YRHMPSQ (SEQ ID NO: 2604) |
| (Chothia) | |
| LCDR1 | QDISNY (SEQ ID NO: 2605) |
| (IMGT) | |
| LCDR2 | RAS (SEQ ID NO: 2603) |
| (IMGT) | |
| LCDR3 | FQYRHMPSQT (SEQ ID NO: 2601) |
| (IMGT) | |
| VL | DIQMTQSPSSLSASVGDRVTITCRASQDISNYLAWYQQKPGKAPKLLIYRASSL |
| | QSGVPSRFSGSGSGTDFTLTISSLQPEDFATYYCFQYRHMPSQTFGQGTKVEIK |
| | (SEQ ID NO: 2606) |
| DNA VL | GACATTCAGATGACCCAGTCCCCGTCGTCCCTGTCCGCATCCGTGGGCGAC |
| | AGAGTCACCATCACTTGCCGGGCCTCACAGGATATTTCCAACTACCTGGCC |
| | TGGTATCAGCAGAAGCCTGGAAAGGCCCCGAAGCTGCTGATCTACCGGGC |
| | GTCCTCCTTGCAATCGGGAGTGCCAAGCCGCTTTTCTGGTTCCGGGAGCGG |
| | GACTGACTTCACCCTGACTATTAGCAGCCTGCAGCCCGAAGATTTCGCTAC |
| | CTACTACTGCTTCCAGTACCGGCACATGCCCTCACAAACCTTCGGACAGGG |
| | CACCAAAGTCGAGATCAAG (SEQ ID NO: 2613) |
| Light Chain | DIQMTQSPSSLSASVGDRVTITCRASQDISNYLAWYQQKPGKAPKLLIYRASSL |
| | QSGVPSRFSGSGSGTDFTLTISSLQPEDFATYYCFQYRHMPSQTFGQGTKVEIK |
| | RTVAAPSVFIFPPSDEQLKSGTASVVCLLNNFYPREAKVQWKVDNALQSGNSQ |
| | ESVTEQDSKDSTYSLSSTLTLSKADYEKHKVYACEVTHQGLSSPVTKSFNRGE |
| | C (SEQ ID NO: 2608) |
| DNA Light | GACATTCAGATGACCCAGTCCCCGTCGTCCCTGTCCGCATCCGTGGGCGAC |
| Chain | AGAGTCACCATCACTTGCCGGGCCTCACAGGATATTTCCAACTACCTGGCC |
| | TGGTATCAGCAGAAGCCTGGAAAGGCCCCGAAGCTGCTGATCTACCGGGC |
| | GTCCTCCTTGCAATCGGGAGTGCCAAGCCGCTTTTCTGGTTCCGGGAGCGG |
| | GACTGACTTCACCCTGACTATTAGCAGCCTGCAGCCCGAAGATTTCGCTAC |
| | CTACTACTGCTTCCAGTACCGGCACATGCCCTCACAAACCTTCGGACAGGG |
| | CACCAAAGTCGAGATCAAGCGTACGGTGGCCGCTCCCAGCGTGTTCATCTT |
| | CCCCCCCAGCGACGAGCAGCTGAAGAGCGGCACCGCCAGCGTGGTGTGCC |
| | TGCTGAACAACTTCTACCCCCGGGAGGCCAAGGTGCAGTGGAAGGTGGAC |
| | AACGCCCTGCAGAGCGGCAACAGCCAGGAGAGCGTCACCGAGCAGGACA |
| | GCAAGGACTCCACCTACAGCCTGAGCAGCACCCTGACCCTGAGCAAGGCC |
| | GACTACGAGAAGCATAAGGTGTACGCCTGCGAGGTGACCCACCAGGGCCT |
| | GTCCAGCCCCGTGACCAAGAGCTTCAACAGGGGCGAGTGC (SEQ ID NO: 2614) |

MOR44698E

| | |
|---|---|
| HCDR1 | GYTFTGYHMS (SEQ ID NO: 2586) |
| (Combined) | |
| HCDR2 | VINPVSGNTVYAQKFQG (SEQ ID NO: 2587) |
| (Combined) | |
| HCDR3 | IPSYTYAFDY (SEQ ID NO: 2588) |
| (Combined) | |
| HCDR1 | GYHMS (SEQ ID NO: 2589) |
| (Kabat) | |
| HCDR2 | VINPVSGNTVYAQKFQG (SEQ ID NO: 2587) |
| (Kabat) | |
| HCDR3 | IPSYTYAFDY (SEQ ID NO: 2588) |
| (Kabat) | |
| HCDR1 | GYTFTGY (SEQ ID NO: 2590) |
| (Chothia) | |
| HCDR2 | NPVSGN (SEQ ID NO: 2591) |
| (Chothia) | |
| HCDR3 | IPSYTYAFDY (SEQ ID NO: 2588) |
| (Chothia) | |
| HCDR1 | GYTFTGYH (SEQ ID NO: 2592) |
| (IMGT) | |
| HCDR2 | INPVSGNT (SEQ ID NO: 2593) |
| (IMGT) | |
| HCDR3 | ARIPSYTYAFDY (SEQ ID NO: 2594) |
| (IMGT) | |
| VH | QVQLVQSGAEVKKPGASVKVSCKASGYTFTGYHMSWVRQAPGQGLEWMGV |
| | INPVSGNTVYAQKFQGRVTMTRDTSISTAYMELSRLRSEDTAVYYCARIPSYT |
| | YAFDYWGQGTLVTVSS (SEQ ID NO: 2595) |
| DNA VH | CAAGTGCAACTCGTGCAGTCAGGAGCCGAAGTCAAGAAGCCTGGAGCCTC |
| | GGTCAAGGTGTCCTGCAAGGCCAGCGGATACACTTTCACTGGATACCACAT |
| | GTCGTGGGTCAGACAGGCTCCTGGCCAAGGGCTGGAGTGGATGGGCGTCA |
| | TCAACCCGGTGTCGGGTAATACCGTGTACGCCCAGAAGTTCCAGGGTCGCG |
| | TGACCATGACCCGGGATACCTCCATTAGCACCGCGTACATGGAGCTCAGCC |
| | GGTTGAGATCCGAGGATACCGCCGTGTACTACTGTGCGCGGATCCCGTCCT |
| | ACACTTACGCCTTCGACTATTGGGGCCAGGGGACTCTTGTCACCGTGTCCT |
| | CG (SEQ ID NO: 2610) |
| Heavy Chain | QVQLVQSGAEVKKPGASVKVSCKASGYTFTGYHMSWVRQAPGQGLEWMGV |
| | INPVSGNTVYAQKFQGRVTMTRDTSISTAYMELSRLRSEDTAVYYCARIPSYT |
| | YAFDYWGQGTLVTVSSASTKGPSVFPLAPSSKSTSGGTAALGCLVKDYFPEPV |
| | TVSWNSGALTSGVHTFPAVLQSSGLYSLSSVVTVPSSSLGTQTYICNVNHKPSN |
| | TKVDKRVEPKSCDKTHTCPPCPAPELLGGPSVFLFPPKPKDTLMISRTPEVTCV |
| | VVAVSHEDPEVKFNWYVDGVEVHNAKTKPREEQYNSTYRVVSVLTVLHQD |
| | WLNGKEYKCKVSNKALAAPIEKTISKAKGQPREPQVYTLPPSREEMTKNQVSL |
| | TCLVKGFYPSDIAVEWESNGQPENNYKTTPPVLDSDGSFFLYSKLTVDKSRWQ |
| | QGNVFSCSVLHEALHSHYTQKSLSLSPGK (SEQ ID NO: 2619) |
| DNA Heavy | CAAGTGCAACTCGTGCAGTCAGGAGCCGAAGTCAAGAAGCCTGGAGCCTC |
| Chain | GGTCAAGGTGTCCTGCAAGGCCAGCGGATACACTTTCACTGGATACCACAT |
| | GTCGTGGGTCAGACAGGCTCCTGGCCAAGGGCTGGAGTGGATGGGCGTCA |
| | TCAACCCGGTGTCGGGTAATACCGTGTACGCCCAGAAGTTCCAGGGTCGCG |
| | TGACCATGACCCGGGATACCTCCATTAGCACCGCGTACATGGAGCTCAGCC |
| | GGTTGAGATCCGAGGATACCGCCGTGTACTACTGTGCGCGGATCCCGTCCT |
| | ACACTTACGCCTTCGACTATTGGGGCCAGGGGACTCTTGTCACCGTGTCCT |
| | CGGCCTCCACTAAGGGCCCGTCAGTGTTCCCCCTTGCGCCATCCTCGAAGT |
| | CAACCTCCGGAGGAACTGCCGCACTGGGTTGCCTCGTGAAAGACTATTTCC |
| | CGGAACCCGTCACTGTCTCCTGGAACTCAGGAGCGCTCACCAGCGGAGTGC |
| | ATACCTTTCCTGCGGTGCTGCAGTCCAGCGGCCTGTACTCCCTGAGCTCCGT |
| | CGTGACCGTCCCCTCGTCGTCCCTGGGAACCCAAACCTACATTTGCAACGT |
| | CAATCACAAGCCAAGCAACACTAAGGTGGACAAGAGAGTGGAGCCCAAGT |
| | CCTGCGATAAGACCCACACCTGTCCTCCCTGTCCGGCACCTGAACTGCTTG |
| | GTGGACCTTCCGTGTTCCTGTTCCCGCCCAAGCCAAAAGACACCCTGATGA |
| | TCTCCCGCACTCCGGAAGTCACTTGCGTGGTCGTGGCCGTGTCCCACGAGG |
| | ACCCCGAGGTCAAGTTTAATTGGTACGTGGACGGAGTGGAAGTGCACAAC |
| | GCCAAGACCAAGCCGCGGGAAGAACAGTACAACTCCACCTACCGCGTGGT |
| | GTCCGTCCTGACTGTGCTCCACCAGGACTGGCTGAACGGAAAGGAGTACA |
| | AGTGCAAAGTGTCCAACAAGGCACTGGCTGCCCCTATCGAAAAGACTATCT |
| | CCAAGGCCAAGGGCCAACCTAGGGAGCCCCAGGTGTACACGTTGCCTCCTT |
| | CCCGCGAAGAAATGACTAAGAACCAGGTGTCGCTGACCTGTCTCGTGAAA |
| | GGGTTCTACCCCTCTGACATCGCCGTGGAATGGGAGTCAAACGGACAGCCT |
| | GAGAACAACTATAAGACCACACCACCTGTCCTGGACTCCGACGGCTCCTTC |
| | TTCCTGTACTCAAAGTTGACCGTGGACAAGTCGCGGTGGCAACAGGGCAAC |
| | GTGTTCTCTTGCTCCGTGCTGCACGAAGCCCTGCACAGCCACTACACCCAA |
| | AAGTCGCTCAGCCTCTCCCCCGGAAAG (SEQ ID NO: 2620) |
| LCDR1 | RASQDISNYLA (SEQ ID NO: 2599) |
| (Combined) | |
| LCDR2 | RASSLQS (SEQ ID NO: 2600) |
| (Combined) | |
| LCDR3 | FQYRHMPSQT (SEQ ID NO: 2601) |
| (Combined) | |
| LCDR1 | RASQDISNYLA (SEQ ID NO: 2599) |
| (Kabat) | |
| LCDR2 | RASSLQS (SEQ ID NO: 2600) |
| (Kabat) | |
| LCDR3 | FQYRHMPSQT (SEQ ID NO: 2601) |
| (Kabat) | |
| LCDR1 | SQDISNY (SEQ ID NO: 2602) |
| (Chothia) | |
| LCDR2 | RAS (SEQ ID NO: 2603) |
| (Chothia) | |
| LCDR3 | YRHMPSQ (SEQ ID NO: 2604) |
| (Chothia) | |
| LCDR1 | QDISNY (SEQ ID NO: 2605) |
| (IMGT) | |
| LCDR2 | RAS (SEQ ID NO: 2603) |
| (IMGT) | |
| LCDR3 | FQYRHMPSQT (SEQ ID NO: 2601) |
| (IMGT) | |
| VL | DIQMTQSPSSLSASVGDRVTITCRASQDISNYLAWYQQKPGKAPKLLIYRASSL |
| | QSGVPSRFSGSGSGTDFTLTISSLQPEDFATYYCFQYRHMPSQTFGQGTKVEIK |
| | (SEQ ID NO: 2606) |
| DNA VL | GACATTCAGATGACCCAGTCCCCGTCGTCCCTGTCCGCATCCGTGGGCGAC |
| | AGAGTCACCATCACTTGCCGGGCCTCACAGGATATTTCCAACTACCTGGCC |
| | TGGTATCAGCAGAAGCCTGGAAAGGCCCCGAAGCTGCTGATCTACCGGGC |
| | GTCCTCCTTGCAATCGGGAGTGCCAAGCCGCTTTTCTGGTTCCGGGAGCGG |
| | GACTGACTTCACCCTGACTATTAGCAGCCTGCAGCCCGAAGATTTCGCTAC |
| | CTACTACTGCTTCCAGTACCGGCACATGCCCTCACAAACCTTCGGACAGGG |
| | CACCAAAGTCGAGATCAAG (SEQ ID NO: 2613) |
| Light Chain | DIQMTQSPSSLSASVGDRVTITCRASQDISNYLAWYQQKPGKAPKLLIYRASSL |
| | QSGVPSRFSGSGSGTDFTLTISSLQPEDFATYYCFQYRHMPSQTFGQGTKVEIK |
| | RTVAAPSVFIFPP SDEQLKSGTASVVCLLNNFYPREAKVQWKVDNALQSGNSQ |
| | ESVTEQDSKDSTYSLSSTLTLSKADYEKHKVYACEVTHQGLSSPVTKSFNRGE |
| | C (SEQ ID NO: 2608) |
| DNA Light | GACATTCAGATGACCCAGTCCCCGTCGTCCCTGTCCGCATCCGTGGGCGAC |
| Chain | AGAGTCACCATCACTTGCCGGGCCTCACAGGATATTTCCAACTACCTGGCC |
| | TGGTATCAGCAGAAGCCTGGAAAGGCCCCGAAGCTGCTGATCTACCGGGC |
| | GTCCTCCTTGCAATCGGGAGTGCCAAGCCGCTTTTCTGGTTCCGGGAGCGG |
| | GACTGACTTCACCCTGACTATTAGCAGCCTGCAGCCCGAAGATTTCGCTAC |
| | CTACTACTGCTTCCAGTACCGGCACATGCCCTCACAAACCTTCGGACAGGG |
| | CACCAAAGTCGAGATCAAGCGTACGGTGGCCGCTCCCAGCGTGTTCATCTT |
| | CCCCCCCAGCGACGAGCAGCTGAAGAGCGGCACCGCCAGCGTGGTGTGCC |
| | TGCTGAACAACTTCTACCCCCGGGAGGCCAAGGTGCAGTGGAAGGTGGAC |
| | AACGCCCTGCAGAGCGGCAACAGCCAGGAGAGCGTCACCGAGCAGGACA |
| | GCAAGGACTCCACCTACAGCCTGAGCAGCACCCTGACCCTGAGCAAGGCC |
| | GACTACGAGAAGCATAAGGTGTACGCCTGCGAGGTGACCCACCAGGGCCT |
| | GTCCAGCCCCGTGACCAAGAGCTTCAACAGGGGCGAGTGC (SEQ ID NO: 2614) |

MOR44698F

| | |
|---|---|
| HCDR1 | GYTFTGYHMS (SEQ ID NO: 2586) |
| (Combined) | |
| HCDR2 | VINPVSGNTVYAQKFQG (SEQ ID NO: 2587) |
| (Combined) | |
| HCDR3 | IPSYTYAFDY (SEQ ID NO: 2588) |
| (Combined) | |
| HCDR1 | GYHMS (SEQ ID NO: 2589) |
| (Kabat) | |
| HCDR2 | VINPVSGNTVYAQKFQG (SEQ ID NO: 2587) |
| (Kabat) | |
| HCDR3 | IPSYTYAFDY (SEQ ID NO: 2588) |
| (Kabat) | |
| HCDR1 | GYTFTGY (SEQ ID NO: 2590) |
| (Chothia) | |
| HCDR2 | NPVSGN (SEQ ID NO: 2591) |
| (Chothia) | |
| HCDR3 | IPSYTYAFDY (SEQ ID NO: 2588) |
| (Chothia) | |
| HCDR1 | GYTFTGYH (SEQ ID NO: 2592) |
| (IMGT) | |
| HCDR2 | INPVSGNT (SEQ ID NO: 2593) |
| (IMGT) | |
| HCDR3 | ARIPSYTYAFDY (SEQ ID NO: 2594) |
| (IMGT) | |
| VH | QVQLVQSGAEVKKPGASVKVSCKASGYTFTGYHMSWVRQAPGQGLEWMGV |
| | INPVSGNTVYAQKFQGRVTMTRDTSISTAYMELSRLRSEDTAVYYCARIPSYT |
| | YAFDYWGQGTLVTVSS (SEQ ID NO: 2595) |
| DNA VH | CAAGTGCAACTCGTGCAGTCAGGAGCCGAAGTCAAGAAGCCTGGAGCCTC |
| | GGTCAAGGTGTCCTGCAAGGCCAGCGGATACACTTTCACTGGATACCACAT |
| | GTCGTGGGTCAGACAGGCTCCTGGCCAAGGGCTGGAGTGGATGGGCGTCA |
| | TCAACCCGGTGTCGGGTAATACCGTGTACGCCCAGAAGTTCCAGGGTCGCG |
| | TGACCATGACCCGGGATACCTCCATTAGCACCGCGTACATGGAGCTCAGCC |
| | GGTTGAGATCCGAGGATACCGCCGTGTACTACTGTGCGCGGATCCCGTCCT |
| | ACACTTACGCCTTCGACTATTGGGGCCAGGGGACTCTTGTCACCGTGTCCT |
| | CG (SEQ ID NO: 2610) |
| Heavy Chain | QVQLVQSGAEVKKPGASVKVSCKASGYTFTGYHMSWVRQAPGQGLEWMGV |
| | INPVSGNTVYAQKFQGRVTMTRDTSISTAYMELSRLRSEDTAVYYCARIPSYT |
| | YAFDYWGQGTLVTVSSASTKGPSVFPLAPSSKSTSGGTAALGCLVKDYFPEPV |
| | TVSWNSGALTSGVHTFPAVLQSSGLYSLSSVVTVPSSSLGTQTYICNVNHKPSN |
| | TKVDKRVEPKSCDKTHTCPPCPAPELLGGPSVFLFPPKPKDTLYITREPEVTCV |
| | VVDVSHEDPEVKFNWYVDGVEVHNAKTKPREEQYNSTYRVVSVLTVLHQD |
| | WLNGKEYKCKVSNKALPAPIEKTISKAKGQPREPQVYTLPPSREEMTKNQVSL |
| | TCLVKGFYPSDIAVEWESNGQPENNYKTTPPVLDSDGSFFLYSKLTVDKSRWQ |
| | QGNVFSCSVMHEALHNHYTQKSLSLSPGK (SEQ ID NO: 2621) |
| DNA Heavy | CAAGTGCAACTCGTGCAGTCAGGAGCCGAAGTCAAGAAGCCTGGAGCCTC |
| Chain | GGTCAAGGTGTCCTGCAAGGCCAGCGGATACACTTTCACTGGATACCACAT |
| | GTCGTGGGTCAGACAGGCTCCTGGCCAAGGGCTGGAGTGGATGGGCGTCA |
| | TCAACCCGGTGTCGGGTAATACCGTGTACGCCCAGAAGTTCCAGGGTCGCG |
| | TGACCATGACCCGGGATACCTCCATTAGCACCGCGTACATGGAGCTCAGCC |
| | GGTTGAGATCCGAGGATACCGCCGTGTACTACTGTGCGCGGATCCCGTCCT |
| | ACACTTACGCCTTCGACTATTGGGGCCAGGGGACTCTTGTCACCGTGTCCT |
| | CGGCCTCCACTAAGGGCCCGTCAGTGTTCCCCCTTGCGCCATCCTCGAAGT |
| | CAACCTCCGGAGGAACTGCCGCACTGGGTTGCCTCGTGAAAGACTATTTCC |
| | CGGAACCCGTCACTGTCTCCTGGAACTCAGGAGCGCTCACCAGCGGAGTGC |
| | ATACCTTTCCTGCGGTGCTGCAGTCCAGCGGCCTGTACTCCCTGAGCTCCGT |
| | CGTGACCGTCCCCTCGTCGTCCCTGGGAACCCAAACCTACATTTGCAACGT |
| | CAATCACAAGCCAAGCAACACTAAGGTGGACAAGAGAGTGGAGCCCAAGT |
| | CCTGCGATAAGACCCACACCTGTCCTCCCTGTCCGGCACCTGAACTGCTTG |
| | GTGGACCTTCCGTGTTCCTGTTCCCGCCCAAGCCAAAAGACACCCTGTATA |
| | TCACTCGCGAACCGGAAGTCACTTGCGTGGTCGTGGACGTGTCCCACGAGG |
| | ACCCCGAGGTCAAGTTTAATTGGTACGTGGACGGAGTGGAAGTGCACAAC |
| | GCCAAGACCAAGCCGCGGGAAGAACAGTACAACTCCACCTACCGCGTGGT |
| | GTCCGTCCTGACTGTGCTCCACCAGGACTGGCTGAACGGAAAGGAGTACA |
| | AGTGCAAAGTGTCCAACAAGGCACTGCCAGCCCCTATCGAAAAGACTATC |
| | TCCAAGGCCAAGGGCCAACCTAGGGAGCCCCAGGTGTACACGTTGCCTCCT |
| | TCCCGCGAAGAAATGACTAAGAACCAGGTGTCGCTGACCTGTCTCGTGAAA |
| | GGGTTCTACCCCTCTGACATCGCCGTGGAATGGGAGTCAAACGGACAGCCT |
| | GAGAACAACTATAAGACCACACCACCTGTCCTGGACTCCGACGGCTCCTTC |
| | TTCCTGTACTCAAAGTTGACCGTGGACAAGTCGCGGTGGCAACAGGGCAAC |
| | GTGTTCTCTTGCTCCGTGATGCACGAAGCCCTGCACAACCACTACACCCAA |
| | AAGTCGCTCAGCCTCTCCCCCGGAAAG (SEQ ID NO: 2622) |
| LCDR1 | RASQDISNYLA (SEQ ID NO: 2599) |
| (Combined) | |
| LCDR2 | RASSLQS (SEQ ID NO: 2600) |
| (Combined) | |
| LCDR3 | FQYRHMPSQT (SEQ ID NO: 2601) |
| (Combined) | |
| LCDR1 | RASQDISNYLA (SEQ ID NO: 2599) |
| (Kabat) | |
| LCDR2 | RASSLQS (SEQ ID NO: 2600) |
| (Kabat) | |
| LCDR3 | FQYRHMPSQT (SEQ ID NO: 2601) |
| (Kabat) | |
| LCDR1 | SQDISNY (SEQ ID NO: 2602) |
| (Chothia) | |
| LCDR2 | RAS (SEQ ID NO: 2603) |
| (Chothia) | |
| LCDR3 | YRHMPSQ (SEQ ID NO: 2604) |
| (Chothia) | |
| LCDR1 | QDISNY (SEQ ID NO: 2605) |
| (IMGT) | |
| LCDR2 | RAS (SEQ ID NO: 2603) |
| (IMGT) | |
| LCDR3 | FQYRHMPSQT (SEQ ID NO: 2601) |
| (IMGT) | |
| VL | DIQMTQSPSSLSASVGDRVTITCRASQDISNYLAWYQQKPGKAPKLLIYRASSL |
| | QSGVPSRFSGSGSGTDFTLTISSLQPEDFATYYCFQYRHMPSQTFGQGTKVEIK |
| | (SEQ ID NO: 2606) |
| DNA VL | GACATTCAGATGACCCAGTCCCCGTCGTCCCTGTCCGCATCCGTGGGCGAC |
| | AGAGTCACCATCACTTGCCGGGCCTCACAGGATATTTCCAACTACCTGGCC |
| | TGGTATCAGCAGAAGCCTGGAAAGGCCCCGAAGCTGCTGATCTACCGGGC |
| | GTCCTCCTTGCAATCGGGAGTGCCAAGCCGCTTTTCTGGTTCCGGGAGCGG |
| | GACTGACTTCACCCTGACTATTAGCAGCCTGCAGCCCGAAGATTTCGCTAC |
| | CTACTACTGCTTCCAGTACCGGCACATGCCCTCACAAACCTTCGGACAGGG |
| | CACCAAAGTCGAGATCAAG (SEQ ID NO: 2613) |
| Light Chain | DIQMTQSPSSLSASVGDRVTITCRASQDISNYLAWYQQKPGKAPKLLIYRASSL |
| | QSGVPSRFSGSGSGTDFTLTISSLQPEDFATYYCFQYRHMPSQTFGQGTKVEIK |
| | RTVAAPSVFIFPPSDEQLKSGTASVVCLLNNFYPREAKVQWKVDNALQSGNSQ |
| | ESVTEQDSKDSTYSLSSTLTLSKADYEKHKVYACEVTHQGLSSPVTKSFNRGE |
| | C (SEQ ID NO: 2608) |
| DNA Light | GACATTCAGATGACCCAGTCCCCGTCGTCCCTGTCCGCATCCGTGGGCGAC |
| Chain | AGAGTCACCATCACTTGCCGGGCCTCACAGGATATTTCCAACTACCTGGCC |
| | TGGTATCAGCAGAAGCCTGGAAAGGCCCCGAAGCTGCTGATCTACCGGGC |
| | GTCCTCCTTGCAATCGGGAGTGCCAAGCCGCTTTTCTGGTTCCGGGAGCGG |
| | GACTGACTTCACCCTGACTATTAGCAGCCTGCAGCCCGAAGATTTCGCTAC |
| | CTACTACTGCTTCCAGTACCGGCACATGCCCTCACAAACCTTCGGACAGGG |
| | CACCAAAGTCGAGATCAAGCGTACGGTGGCCGCTCCCAGCGTGTTCATCTT |
| | CCCCCCCAGCGACGAGCAGCTGAAGAGCGGCACCGCCAGCGTGGTGTGCC |
| | TGCTGAACAACTTCTACCCCCGGGAGGCCAAGGTGCAGTGGAAGGTGGAC |
| | AACGCCCTGCAGAGCGGCAACAGCCAGGAGAGCGTCACCGAGCAGGACA |
| | GCAAGGACTCCACCTACAGCCTGAGCAGCACCCTGACCCTGAGCAAGGCC |
| | GACTACGAGAAGCATAAGGTGTACGCCTGCGAGGTGACCCACCAGGGCCT |
| | GTCCAGCCCCGTGACCAAGAGCTTCAACAGGGGCGAGTGC (SEQ ID NO: 2614) |

MOR44746A

| | |
|---|---|
| HCDR1 | GDSVSSSSAAWN (SEQ ID NO: 2623) |
| (Combined) | |
| HCDR2 | HIGYRSKWYNEYAVSVKS (SEQ ID NO: 2624) |
| (Combined) | |
| HCDR3 | GMYGSVPYKEGYYFDI (SEQ ID NO: 2625) |
| (Combined) | |
| HCDR1 | SSSAAWN (SEQ ID NO: 2626) |
| (Kabat) | |
| HCDR2 | HIGYRSKWYNEYAVSVKS (SEQ ID NO: 2624) |
| (Kabat) | |
| HCDR3 | GMYGSVPYKEGYYFDI (SEQ ID NO: 2625) |
| (Kabat) | |
| HCDR1 | GDSVSSSSA (SEQ ID NO: 2627) |
| (Chothia) | |
| HCDR2 | GYRSKWY (SEQ ID NO: 2628) |
| (Chothia) | |
| HCDR3 | GMYGSVPYKEGYYFDI (SEQ ID NO: 2625) |
| (Chothia) | |
| HCDR1 | GDSVSSSSAA (SEQ ID NO: 2629) |
| (IMGT) | |
| HCDR2 | IGYRSKWYN (SEQ ID NO: 2630) |
| (IMGT) | |
| HCDR3 | ARGMYGSVPYKEGYYFDI (SEQ ID NO: 2631) |
| (IMGT) | |
| VH | QVQLQQSGPGLVKPSQTLSLTCAISGDSVSSSSAAWNWIRQSPSRGLEWLGHI |
| | GYRSKWYNEYAVSVKSRITINPDTSKNQFSLQLNSVTPEDTAVYYCARGMYG |
| | SVPYKEGYYFDIWGQGTLVTVSS (SEQ ID NO: 2632) |
| DNA VH | CAGGTGCAATTGCAGCAGAGCGGTCCGGGCCTGGTGAAACCGAGCCAGAC |
| | CCTGAGCCTGACCTGCGCGATTTCCGGAGATAGCGTGAGCTCTTCTTCTGCT |
| | GCTTGGAACTGGATTCGTCAGAGCCCGAGCCGTGGCCTCGAGTGGCTGGGC |
| | CATATCGGTTACCGTAGCAAATGGTACAACGAATATGCCGTGAGCGTGAA |
| | AAGCCGCATTACCATTAACCCGGATACTTCGAAAAACCAGTTTAGCCTGCA |
| | ACTGAACAGCGTGACCCCGGAAGATACGGCCGTGTATTATTGCGCGCGTGG |
| | TATGTACGGTTCTGTTCCCTACAAAGAAGGTTACTACTTCGATATTTGGGGC |
| | CAAGGCACCCTGGTGACTGTTAGCTCA (SEQ ID NO: 2633) |
| Heavy Chain | QVQLQQSGPGLVKPSQTLSLTCAISGDSVSSSSAAWNWIRQSPSRGLEWLGHI |
| | GYRSKWYNEYAVSVKSRITINPDTSKNQFSLQLNSVTPEDTAVYYCARGMYG |
| | SVPYKEGYYFDIWGQGTLVTVSSASTKGPSVFPLAPSSKSTSGGTAALGCLVK |
| | DYFPEPVTVSWNSGALTSGVHTFPAVLQSSGLYSLSSVVTVPSSSLGTQTYICN |
| | VNHKPSNTKVDKRVEPKSCDKTHTCPPCPAPEAAGGPSVFLFPPKPKDTLMISR |
| | TPEVTCVVVDVSHEDPEVKFNWYVDGVEVHNAKTKPREEQYNSTYRVVSVL |
| | TVLHQDWLNGKEYKCKVSNKALPAPIEKTISKAKGQPREPQVYTLPPSREEMT |
| | KNQVSLTCLVKGFYPSDIAVEWESNGQPENNYKTTPPVLDSDGSFFLYSKLTV |
| | DKSRWQQGNVFSCSVMHEALHNHYTQKSLSLSPGK (SEQ ID NO: 2634) |
| DNA Heavy | CAGGTGCAATTGCAGCAGAGCGGTCCGGGCCTGGTGAAACCGAGCCAGAC |
| Chain | CCTGAGCCTGACCTGCGCGATTTCCGGAGATAGCGTGAGCTCTTCTTCTGCT |
| | GCTTGGAACTGGATTCGTCAGAGCCCGAGCCGTGGCCTCGAGTGGCTGGGC |
| | CATATCGGTTACCGTAGCAAATGGTACAACGAATATGCCGTGAGCGTGAA |
| | AAGCCGCATTACCATTAACCCGGATACTTCGAAAAACCAGTTTAGCCTGCA |
| | ACTGAACAGCGTGACCCCGGAAGATACGGCCGTGTATTATTGCGCGCGTGG |
| | TATGTACGGTTCTGTTCCCTACAAAGAAGGTTACTACTTCGATATTTGGGGC |
| | CAAGGCACCCTGGTGACTGTTAGCTCAGCCTCCACCAAGGGTCCATCGGTC |
| | TTCCCCCTGGCACCCTCCTCCAAGAGCACCTCTGGGGGCACAGCGGCCCTG |
| | GGCTGCCTGGTCAAGGACTACTTCCCCGAACCGGTGACGGTGTCGTGGAAC |
| | TCAGGCGCCCTGACCAGCGGCGTGCACACCTTCCCGGCTGTCCTACAGTCC |
| | TCAGGACTCTACTCCCTCAGCAGCGTGGTGACCGTGCCCTCCAGCAGCTTG |
| | GGCACCCAGACCTACATCTGCAACGTGAATCACAAGCCCAGCAACACCAA |
| | GGTGGACAAGAGAGTTGAGCCCAAATCTTGTGACAAAACTCACACATGCC |
| | CACCGTGCCCAGCACCTGAAGCAGCGGGGGGACCGTCAGTCTTCCTCTTCC |
| | CCCCAAAACCCAAGGACACCCTCATGATCTCCCGGACCCCTGAGGTCACAT |
| | GCGTGGTGGTGGACGTGAGCCACGAAGACCCTGAGGTCAAGTTCAACTGG |
| | TACGTGGACGGCGTGGAGGTGCATAATGCCAAGACAAAGCCGCGGGAGGA |
| | GCAGTACAACAGCACGTACCGGGTGGTCAGCGTCCTCACCGTCCTGCACCA |
| | GGACTGGCTGAATGGCAAGGAGTACAAGTGCAAGGTCTCCAACAAAGCCC |
| | TCCCAGCCCCCATCGAGAAAACCATCTCCAAAGCCAAAGGGCAGCCCCGA |
| | GAACCACAGGTGTACACCCTGCCCCCATCCCGGGAGGAGATGACCAAGAA |
| | CCAGGTCAGCCTGACCTGCCTGGTCAAAGGCTTCTATCCCAGCGACATCGC |
| | CGTGGAGTGGGAGAGCAATGGGCAGCCGGAGAACAACTACAAGACCACG |
| | CCTCCCGTGCTGGACTCCGACGGCTCCTTCTTCCTCTACAGCAAGCTCACCG |
| | TGGACAAGAGCAGGTGGCAGCAGGGGAACGTCTTCTCATGCTCCGTGATG |
| | CATGAGGCTCTGCACAACCACTACACGCAGAAGAGCCTCTCCCTGTCTCCG |
| | GGTAAA (SEQ ID NO: 2635) |
| LCDR1 | RASQGISSDLN (SEQ ID NO: 2636) |
| (Combined) | |
| LCDR2 | AASNLQS (SEQ ID NO: 2637) |
| (Combined) | |
| LCDR3 | QQYTDESMT (SEQ ID NO: 2638) |
| (Combined) | |
| LCDR1 | RASQGISSDLN (SEQ ID NO: 2636) |
| (Kabat) | |
| LCDR2 | AASNLQS (SEQ ID NO: 2637) |
| (Kabat) | |
| LCDR3 | QQYTDESMT (SEQ ID NO: 2638) |
| (Kabat) | |
| LCDR1 | SQGISSD (SEQ ID NO: 2639) |
| (Chothia) | |
| LCDR2 | AAS (SEQ ID NO: 2640) |
| (Chothia) | |
| LCDR3 | YTDESM (SEQ ID NO: 2641) |
| (Chothia) | |
| LCDR1 | QGISSD (SEQ ID NO: 2642) |
| (IMGT) | |
| LCDR2 | AAS (SEQ ID NO: 2640) |
| (IMGT) | |
| LCDR3 | QQYTDESMT (SEQ ID NO: 2638) |
| (IMGT) | |
| VL | DIQMTQSPSSLSASVGDRVTITCRASQGISSDLNWYQQKPGKAPKLLIYAASNL |
| | QSGVPSRFSGSGSGTDFTLTISSLQPEDFATYYCQQYTDESMTFGQGTKVEIK |
| | (SEQ ID NO: 2643) |
| DNA VL | GATATCCAGATGACCCAGAGCCCGAGCAGCCTGAGCGCCAGCGTGGGCGA |
| | TCGCGTGACCATTACCTGCAGAGCCAGCCAGGGTATTTCTTCTGACCTGAA |
| | CTGGTACCAGCAGAAACCGGGCAAAGCGCCGAAACTATTAATCTACGCTG |
| | CTTCTAACCTGCAAAGCGGCGTGCCGAGCCGCTTTAGCGGCAGCGGATCCG |
| | GCACCGATTTCACCCTGACCATTAGCTCTCTGCAACCGGAAGACTTTGCGA |
| | CCTATTATTGCCAGCAGTACACTGACGAATCTATGACCTTTGGCCAGGGCA |
| | CGAAAGTTGAAATTAAA (SEQ ID NO: 2644) |
| Light Chain | DIQMTQSPSSLSASVGDRVTITCRASQGISSDLNWYQQKPGKAPKLLIYAASNL |
| | QSGVPSRFSGSGSGTDFTLTISSLQPEDFATYYCQQYTDESMTFGQGTKVEIKR |
| | TVAAPSVFIFPPSDEQLKSGTASVVCLLNNFYPREAKVQWKVDNALQSGNSQE |
| | SVTEQDSKDSTYSLSSTLTLSKADYEKHKVYACEVTHQGLSSPVTKSFNRGEC |
| | (SEQ ID NO: 2645) |
| DNA Light | GATATCCAGATGACCCAGAGCCCGAGCAGCCTGAGCGCCAGCGTGGGCGA |
| Chain | TCGCGTGACCATTACCTGCAGAGCCAGCCAGGGTATTTCTTCTGACCTGAA |
| | CTGGTACCAGCAGAAACCGGGCAAAGCGCCGAAACTATTAATCTACGCTG |
| | CTTCTAACCTGCAAAGCGGCGTGCCGAGCCGCTTTAGCGGCAGCGGATCCG |
| | GCACCGATTTCACCCTGACCATTAGCTCTCTGCAACCGGAAGACTTTGCGA |
| | CCTATTATTGCCAGCAGTACACTGACGAATCTATGACCTTTGGCCAGGGCA |
| | CGAAAGTTGAAATTAAACGTACGGTGGCCGCTCCCAGCGTGTTCATCTTCC |
| | CCCCCAGCGACGAGCAGCTGAAGAGCGGCACCGCCAGCGTGGTGTGCCTG |
| | CTGAACAACTTCTACCCCCGGGAGGCCAAGGTGCAGTGGAAGGTGGACAA |
| | CGCCCTGCAGAGCGGCAACAGCCAGGAAAGCGTCACCGAGCAGGACAGCA |
| | AGGACTCCACCTACAGCCTGAGCAGCACCCTGACCCTGAGCAAGGCCGAC |
| | TACGAGAAGCACAAGGTGTACGCCTGCGAGGTGACCCACCAGGGCCTGTC |
| | CAGCCCCGTGACCAAGAGCTTCAACCGGGGCGAGTGT (SEQ ID NO: 2646) |

MOR44746B

| | |
|---|---|
| HCDR1 | GDSVSSSSAAWN (SEQ ID NO: 2623) |
| (Combined) | |
| HCDR2 | HIGYRSKWYNEYAVSVKS (SEQ ID NO: 2624) |
| (Combined) | |
| HCDR3 | GMYGSVPYKEGYYFDI (SEQ ID NO: 2625) |
| (Combined) | |
| HCDR1 | SSSAAWN (SEQ ID NO: 2626) |
| (Kabat) | |
| HCDR2 | HIGYRSKWYNEYAVSVKS (SEQ ID NO: 2624) |
| (Kabat) | |
| HCDR3 | GMYGSVPYKEGYYFDI (SEQ ID NO: 2625) |
| (Kabat) | |
| HCDR1 | GDSVSSSSA (SEQ ID NO: 2627) |
| (Chothia) | |
| HCDR2 | GYRSKWY (SEQ ID NO: 2628) |
| (Chothia) | |
| HCDR3 | GMYGSVPYKEGYYFDI (SEQ ID NO: 2625) |
| (Chothia) | |
| HCDR1 | GDSVSSSSAA (SEQ ID NO: 2629) |
| (IMGT) | |
| HCDR2 | IGYRSKWYN (SEQ ID NO: 2630) |
| (IMGT) | |
| HCDR3 | ARGMYGSVPYKEGYYFDI (SEQ ID NO: 2631) |
| (IMGT) | |
| VH | QVQLQQSGPGLVKPSQTLSLTCAISGDSVSSSSAAWNWIRQSPSRGLEWLGHI |
| | GYRSKWYNEYAVSVKSRITINPDTSKNQFSLQLNSVTPEDTAVYYCARGMYG |
| | SVPYKEGYYFDIWGQGTLVTVSS (SEQ ID NO: 2632) |
| DNA VH | CAAGTGCAACTCCAGCAGTCAGGACCGGGGTTGGTCAAGCCTTCGCAGAC |
| | CCTGTCCCTCACTTGCGCCATTAGCGGAGATTCGGTGTCGTCGTCGTCAGC |
| | CGCCTGGAACTGGATTAGACAGTCCCCTTCCCGAGGGCTGGAGTGGCTGGG |
| | CCACATCGGATACCGCAGCAAGTGGTACAACGAATACGCCGTCAGCGTGA |
| | AGTCACGCATCACCATCAACCCGGATACTAGCAAGAACCAGTTCAGCCTCC |
| | AGTTGAACTCCGTGACCCCGGAGGATACCGCCGTGTACTACTGTGCGCGGG |
| | GCATGTACGGATCCGTGCCGTACAAGGAGGGATACTACTTCGACATTTGGG |
| | GCCAGGGGACTCTTGTCACCGTGTCCTCG (SEQ ID NO: 2647) |
| Heavy Chain | QVQLQQSGPGLVKPSQTLSLTCAISGDSVSSSSAAWNWIRQSPSRGLEWLGHI |
| | GYRSKWYNEYAVSVKSRITINPDTSKNQFSLQLNSVTPEDTAVYYCARGMYG |
| | SVPYKEGYYFDIWGQGTLVTVSSASTKGPSVFPLAPSSKSTSGGTAALGCLVK |
| | DYFPEPVTVSWNSGALTSGVHTFPAVLQSSGLYSLSSVVTVPSSSLGTQTYICN |
| | VNHKPSNTKVDKRVEPKSCDKTHTCPPCPAPELLGGPSVFLFPPKPKDTLMISR |
| | TPEVTCVVVDVSHEDPEVKFNWYVDGVEVHNAKTKPREEQYNSTYRVVSVL |
| | TVLHQDWLNGKEYKCKVSNKALPAPIEKTISKAKGQPREPQVYTLPPSREEMT |
| | KNQVSLTCLVKGFYPSDIAVEWESNGQPENNYKTTPPVLDSDGSFFLYSKLTV |
| | DKSRWQQGNVFSCSVMHEALHNHYTQKSLSLSPGK (SEQ ID NO: 2648) |
| DNA Heavy | CAAGTGCAACTCCAGCAGTCAGGACCGGGGTTGGTCAAGCCTTCGCAGAC |
| Chain | CCTGTCCCTCACTTGCGCCATTAGCGGAGATTCGGTGTCGTCGTCGTCAGC |
| | CGCCTGGAACTGGATTAGACAGTCCCCTTCCCGAGGGCTGGAGTGGCTGGG |
| | CCACATCGGATACCGCAGCAAGTGGTACAACGAATACGCCGTCAGCGTGA |
| | AGTCACGCATCACCATCAACCCGGATACTAGCAAGAACCAGTTCAGCCTCC |
| | AGTTGAACTCCGTGACCCCGGAGGATACCGCCGTGTACTACTGTGCGCGGG |
| | GCATGTACGGATCCGTGCCGTACAAGGAGGGATACTACTTCGACATTTGGG |
| | GCCAGGGGACTCTTGTCACCGTGTCCTCGGCCTCCACTAAGGGCCCAAGTG |
| | TGTTTCCCCTGGCCCCCAGCAGCAAGTCTACTTCCGGCGGAACTGCTGCCC |
| | TGGGTTGCCTGGTGAAGGACTACTTCCCCGAGCCCGTGACAGTGTCCTGGA |
| | ACTCTGGGGCTCTGACTTCCGGCGTGCACACCTTCCCCGCCGTGCTGCAGA |
| | GCAGCGGCCTGTACAGCCTGAGCAGCGTGGTGACAGTGCCCTCCAGCTCTC |
| | TGGGAACCCAGACCTATATCTGCAACGTGAACCACAAGCCCAGCAACACC |
| | AAGGTGGACAAGAGAGTGGAGCCCAAGAGCTGCGACAAGACCCACACCTG |
| | CCCCCCCTGCCCAGCTCCAGAACTGCTGGGAGGGCCTTCCGTGTTCCTGTT |
| | CCCCCCCAAGCCCAAGGACACCCTGATGATCAGCAGGACCCCCGAGGTGA |
| | CCTGCGTGGTGGTGGACGTGTCCCACGAGGACCCAGAGGTGAAGTTCAACT |
| | GGTACGTGGACGGCGTGGAGGTGCACAACGCCAAGACCAAGCCCAGAGAG |
| | GAGCAGTACAACAGCACCTACAGGGTGGTGTCCGTGCTGACCGTGCTGCA |
| | CCAGGACTGGCTGAACGGCAAAGAATACAAGTGCAAAGTCTCCAACAAGG |
| | CCCTGCCAGCCCCAATCGAAAAGACAATCAGCAAGGCCAAGGGCCAGCCA |
| | CGGGAGCCCCAGGTGTACACCCTGCCCCCCAGCCGGGAGGAGATGACCAA |
| | GAACCAGGTGTCCCTGACCTGTCTGGTGAAGGGCTTCTACCCCAGCGATAT |
| | CGCCGTGGAGTGGGAGAGCAACGGCCAGCCCGAGAACAACTACAAGACCA |
| | CCCCCCCAGTGCTGGACAGCGACGGCAGCTTCTTCCTGTACAGCAAGCTGA |
| | CCGTGGACAAGTCCAGGTGGCAGCAGGGCAACGTGTTCAGCTGCAGCGTG |
| | ATGCACGAGGCCCTGCACAACCACTACACCCAGAAGTCCCTGAGCCTGAG |
| | CCCCGGCAAG (SEQ ID NO: 2649) |
| LCDR1 | RASQGISSDLN (SEQ ID NO: 2636) |
| (Combined) | |
| LCDR2 | AASNLQS (SEQ ID NO: 2637) |
| (Combined) | |
| LCDR3 | QQYTDESMT (SEQ ID NO: 2638) |
| (Combined) | |
| LCDR1 | RASQGISSDLN (SEQ ID NO: 2636) |
| (Kabat) | |
| LCDR2 | AASNLQS (SEQ ID NO: 2637) |
| (Kabat) | |
| LCDR3 | QQYTDESMT (SEQ ID NO: 2638) |
| (Kabat) | |
| LCDR1 | SQGISSD (SEQ ID NO: 2639) |
| (Chothia) | |
| LCDR2 | AAS (SEQ ID NO: 2640) |
| (Chothia) | |
| LCDR3 | YTDESM (SEQ ID NO: 2641) |
| (Chothia) | |
| LCDR1 | QGISSD (SEQ ID NO: 2642) |
| (IMGT) | |
| LCDR2 | AAS (SEQ ID NO: 2640) |
| (IMGT) | |
| LCDR3 | QQYTDESMT (SEQ ID NO: 2638) |
| (IMGT) | |
| VL | DIQMTQSPSSLSASVGDRVTITCRASQGISSDLNWYQQKPGKAPKLLIYAASNL |
| | QSGVPSRFSGSGSGTDFTLTISSLQPEDFATYYCQQYTDESMTFGQGTKVEIK |
| | (SEQ ID NO: 2643) |
| DNA VL | GACATTCAGATGACCCAGTCCCCGTCGTCCCTGTCCGCATCCGTGGGCGAC |
| | AGAGTCACCATCACTTGCCGGGCCTCACAGGGAATTTCCTCCGACCTGAAC |
| | TGGTATCAGCAGAAGCCTGGAAAGGCCCCGAAGCTGCTGATCTACGCCGC |
| | GTCCAACTTGCAATCGGGAGTGCCAAGCCGCTTTTCTGGTTCCGGGAGCGG |
| | GACTGACTTCACCCTGACTATTAGCAGCCTGCAGCCCGAAGATTTCGCTAC |
| | CTACTACTGCCAACAGTACACAGATGAATCCATGACCTTCGGACAGGGCAC |
| | CAAAGTCGAGATCAAG (SEQ ID NO: 2650) |
| Light Chain | DIQMTQSPSSLSASVGDRVTITCRASQGISSDLNWYQQKPGKAPKLLIYAASNL |
| | QSGVPSRFSGSGSGTDFTLTISSLQPEDFATYYCQQYTDESMTFGQGTKVEIKR |
| | TVAAPSVFIFPPSDEQLKSGTASVVCLLNNFYPREAKVQWKVDNALQSGNSQE |
| | SVTEQDSKDSTYSLSSTLTLSKADYEKHKVYACEVTHQGLSSPVTKSFNRGEC |
| | (SEQ ID NO: 2645) |
| DNA Light | GACATTCAGATGACCCAGTCCCCGTCGTCCCTGTCCGCATCCGTGGGCGAC |
| Chain | AGAGTCACCATCACTTGCCGGGCCTCACAGGGAATTTCCTCCGACCTGAAC |
| | TGGTATCAGCAGAAGCCTGGAAAGGCCCCGAAGCTGCTGATCTACGCCGC |
| | GTCCAACTTGCAATCGGGAGTGCCAAGCCGCTTTTCTGGTTCCGGGAGCGG |
| | GACTGACTTCACCCTGACTATTAGCAGCCTGCAGCCCGAAGATTTCGCTAC |
| | CTACTACTGCCAACAGTACACAGATGAATCCATGACCTTCGGACAGGGCAC |
| | CAAAGTCGAGATCAAGCGTACGGTGGCCGCTCCCAGCGTGTTCATCTTCCC |
| | CCCCAGCGACGAGCAGCTGAAGAGCGGCACCGCCAGCGTGGTGTGCCTGC |
| | TGAACAACTTCTACCCCCGGGAGGCCAAGGTGCAGTGGAAGGTGGACAAC |
| | GCCCTGCAGAGCGGCAACAGCCAGGAGAGCGTCACCGAGCAGGACAGCA |
| | AGGACTCCACCTACAGCCTGAGCAGCACCCTGACCCTGAGCAAGGCCGAC |
| | TACGAGAAGCATAAGGTGTACGCCTGCGAGGTGACCCACCAGGGCCTGTC |
| | CAGCCCCGTGACCAAGAGCTTCAACAGGGGCGAGTGC (SEQ ID NO: 2651) |

MOR44746C

| | |
|---|---|
| HCDR1 | GDSVSSSSAAWN (SEQ ID NO: 2623) |
| (Combined) | |
| HCDR2 | HIGYRSKWYNEYAVSVKS (SEQ ID NO: 2624) |
| (Combined) | |
| HCDR3 | GMYGSVPYKEGYYFDI (SEQ ID NO: 2625) |
| (Combined) | |
| HCDR1 | SSSAAWN (SEQ ID NO: 2626) |
| (Kabat) | |
| HCDR2 | HIGYRSKWYNEYAVSVKS (SEQ ID NO: 2624) |
| (Kabat) | |
| HCDR3 | GMYGSVPYKEGYYFDI (SEQ ID NO: 2625) |
| (Kabat) | |
| HCDR1 | GDSVSSSSA (SEQ ID NO: 2627) |
| (Chothia) | |
| HCDR2 | GYRSKWY (SEQ ID NO: 2628) |
| (Chothia) | |
| HCDR3 | GMYGSVPYKEGYYFDI (SEQ ID NO: 2625) |
| (Chothia) | |
| HCDR1 | GDSVSSSSAA (SEQ ID NO: 2629) |
| (IMGT) | |
| HCDR2 | IGYRSKWYN (SEQ ID NO: 2630) |
| (IMGT) | |
| HCDR3 | ARGMYGSVPYKEGYYFDI (SEQ ID NO: 2631) |
| (IMGT) | |
| VH | QVQLQQSGPGLVKPSQTLSLTCAISGDSVSSSSAAWNWIRQSPSRGLEWLGHI |
| | GYRSKWYNEYAVSVKSRITINPDTSKNQFSLQLNSVTPEDTAVYYCARGMYG |
| | SVPYKEGYYFDIWGQGTLVTVSS (SEQ ID NO: 2632) |
| DNA VH | CAAGTGCAACTCCAGCAGTCAGGACCGGGGTTGGTCAAGCCTTCGCAGAC |
| | CCTGTCCCTCACTTGCGCCATTAGCGGAGATTCGGTGTCGTCGTCGTCAGC |
| | CGCCTGGAACTGGATTAGACAGTCCCCTTCCCGAGGGCTGGAGTGGCTGGG |
| | CCACATCGGATACCGCAGCAAGTGGTACAACGAATACGCCGTCAGCGTGA |
| | AGTCACGCATCACCATCAACCCGGATACTAGCAAGAACCAGTTCAGCCTCC |
| | AGTTGAACTCCGTGACCCCGGAGGATACCGCCGTGTACTACTGTGCGCGGG |
| | GCATGTACGGATCCGTGCCGTACAAGGAGGGATACTACTTCGACATTTGGG |
| | GCCAGGGGACTCTTGTCACCGTGTCCTCG (SEQ ID NO: 2647) |
| Heavy Chain | QVQLQQSGPGLVKPSQTLSLTCAISGDSVSSSSAAWNWIRQSPSRGLEWLGHI |
| | GYRSKWYNEYAVSVKSRITINPDTSKNQFSLQLNSVTPEDTAVYYCARGMYG |
| | SVPYKEGYYFDIWGQGTLVTVSSASTKGPSVFPLAPSSKSTSGGTAALGCLVK |
| | DYFPEPVTVSWNSGALTSGVHTFPAVLQSSGLYSLSSVVTVPSSSLGTQTYICN |
| | VNHKPSNTKVDKRVEPKSCDKTHTCPPCPAPELLGGPSVFLFPPKPKDTLMISR |
| | TPEVTCVVVAVSHEDPEVKFNWYVDGVEVHNAKTKPREEQYNSTYRVVSVL |
| | TVLHQDWLNGKEYKCKVSNKALAAPIEKTISKAKGQPREPQVYTLPPSREEMT |
| | KNQVSLTCLVKGFYPSDIAVEWESNGQPENNYKTTPPVLDSDGSFFLYSKLTV |
| | DKSRWQQGNVFSCSVMHEALHNHYTQKSLSLSPGK (SEQ ID NO: 2652) |
| DNA Heavy | CAAGTGCAACTCCAGCAGTCAGGACCGGGGTTGGTCAAGCCTTCGCAGAC |
| Chain | CCTGTCCCTCACTTGCGCCATTAGCGGAGATTCGGTGTCGTCGTCGTCAGC |
| | CGCCTGGAACTGGATTAGACAGTCCCCTTCCCGAGGGCTGGAGTGGCTGGG |
| | CCACATCGGATACCGCAGCAAGTGGTACAACGAATACGCCGTCAGCGTGA |
| | AGTCACGCATCACCATCAACCCGGATACTAGCAAGAACCAGTTCAGCCTCC |
| | AGTTGAACTCCGTGACCCCGGAGGATACCGCCGTGTACTACTGTGCGCGGG |
| | GCATGTACGGATCCGTGCCGTACAAGGAGGGATACTACTTCGACATTTGGG |
| | GCCAGGGGACTCTTGTCACCGTGTCCTCGGCCTCCACTAAGGGCCCGTCAG |
| | TGTTCCCCCTTGCGCCATCCTCGAAGTCAACCTCCGGAGGAACTGCCGCAC |
| | TGGGTTGCCTCGTGAAAGACTATTTCCCGGAACCCGTCACTGTCTCCTGGA |
| | ACTCAGGAGCGCTCACCAGCGGAGTGCATACCTTTCCTGCGGTGCTGCAGT |
| | CCAGCGGCCTGTACTCCCTGAGCTCCGTCGTGACCGTCCCCTCGTCGTCCCT |
| | GGGAACCCAAACCTACATTTGCAACGTCAATCACAAGCCAAGCAACACTA |
| | AGGTGGACAAGAGAGTGGAGCCCAAGTCCTGCGATAAGACCCACACCTGT |
| | CCTCCCTGTCCGGCACCTGAACTGCTTGGTGGACCTTCCGTGTTCCTGTTCC |
| | CGCCCAAGCCAAAAGACACCCTGATGATCTCCCGCACTCCGGAAGTCACTT |
| | GCGTGGTCGTGGCCGTGTCCCACGAGGACCCCGAGGTCAAGTTTAATTGGT |
| | ACGTGGACGGAGTGGAAGTGCACAACGCCAAGACCAAGCCGCGGGAAGA |
| | ACAGTACAACTCCACCTACCGCGTGGTGTCCGTCCTGACTGTGCTCCACCA |
| | GGACTGGCTGAACGGAAAGGAGTACAAGTGCAAAGTGTCCAACAAGGCAC |
| | TGGCTGCCCCTATCGAAAAGACTATCTCCAAGGCCAAGGGCCAACCTAGG |
| | GAGCCCCAGGTGTACACGTTGCCTCCTTCCCGCGAAGAAATGACTAAGAAC |
| | CAGGTGTCGCTGACCTGTCTCGTGAAAGGGTTCTACCCCTCTGACATCGCC |
| | GTGGAATGGGAGTCAAACGGACAGCCTGAGAACAACTATAAGACCACACC |
| | ACCTGTCCTGGACTCCGACGGCTCCTTCTTCCTGTACTCAAAGTTGACCGTG |
| | GACAAGTCGCGGTGGCAACAGGGCAACGTGTTCTCTTGCTCCGTGATGCAC |
| | GAAGCCCTGCACAACCACTACACCCAAAAGTCGCTCAGCCTCTCCCCCGGA |
| | AAG (SEQ ID NO: 2653) |
| LCDR1 | RASQGISSDLN (SEQ ID NO: 2636) |
| (Combined) | |
| LCDR2 | AASNLQS (SEQ ID NO: 2637) |
| (Combined) | |
| LCDR3 | QQYTDESMT (SEQ ID NO: 2638) |
| (Combined) | |
| LCDR1 | RASQGISSDLN (SEQ ID NO: 2636) |
| (Kabat) | |
| LCDR2 | AASNLQS (SEQ ID NO: 2637) |
| (Kabat) | |
| LCDR3 | QQYTDESMT (SEQ ID NO: 2638) |
| (Kabat) | |
| LCDR1 | SQGISSD (SEQ ID NO: 2639) |
| (Chothia) | |
| LCDR2 | AAS (SEQ ID NO: 2640) |
| (Chothia) | |
| LCDR3 | YTDESM (SEQ ID NO: 2641) |
| (Chothia) | |
| LCDR1 | (SEQ ID NO: 2642) |
| (IMGT) | |
| LCDR2 | AAS (SEQ ID NO: 2640) |
| (IMGT) | |
| LCDR3 | QQYTDESMT (SEQ ID NO: 2638) |
| (IMGT) | |
| VL | DIQMTQSPSSLSASVGDRVTITCRASQGISSDLNWYQQKPGKAPKLLIYAASNL |
| | QSGVPSRFSGSGSGTDFTLTISSLQPEDFATYYCQQYTDESMTFGQGTKVEIK |
| | (SEQ ID NO: 2643) |
| DNA VL | GACATTCAGATGACCCAGTCCCCGTCGTCCCTGTCCGCATCCGTGGGCGAC |
| | AGAGTCACCATCACTTGCCGGGCCTCACAGGGAATTTCCTCCGACCTGAAC |
| | TGGTATCAGCAGAAGCCTGGAAAGGCCCCGAAGCTGCTGATCTACGCCGC |
| | GTCCAACTTGCAATCGGGAGTGCCAAGCCGCTTTTCTGGTTCCGGGAGCGG |
| | GACTGACTTCACCCTGACTATTAGCAGCCTGCAGCCCGAAGATTTCGCTAC |
| | CTACTACTGCCAACAGTACACAGATGAATCCATGACCTTCGGACAGGGCAC |
| | CAAAGTCGAGATCAAG (SEQ ID NO: 2650) |
| Light Chain | DIQMTQSPSSLSASVGDRVTITCRASQGISSDLNWYQQKPGKAPKLLIYAASNL |
| | QSGVPSRFSGSGSGTDFTLTISSLQPEDFATYYCQQYTDESMTFGQGTKVEIKR |
| | TVAAPSVFIFPPSDEQLKSGTASVVCLLNNFYPREAKVQWKVDNALQSGNSQE |
| | SVTEQDSKDSTYSLSSTLTLSKADYEKHKVYACEVTHQGLSSPVTKSFNRGEC |
| | (SEQ ID NO: 2645) |
| DNA Light | GACATTCAGATGACCCAGTCCCCGTCGTCCCTGTCCGCATCCGTGGGCGAC |
| Chain | AGAGTCACCATCACTTGCCGGGCCTCACAGGGAATTTCCTCCGACCTGAAC |
| | TGGTATCAGCAGAAGCCTGGAAAGGCCCCGAAGCTGCTGATCTACGCCGC |
| | GTCCAACTTGCAATCGGGAGTGCCAAGCCGCTTTTCTGGTTCCGGGAGCGG |
| | GACTGACTTCACCCTGACTATTAGCAGCCTGCAGCCCGAAGATTTCGCTAC |
| | CTACTACTGCCAACAGTACACAGATGAATCCATGACCTTCGGACAGGGCAC |
| | CAAAGTCGAGATCAAGCGTACGGTGGCCGCTCCCAGCGTGTTCATCTTCCC |
| | CCCCAGCGACGAGCAGCTGAAGAGCGGCACCGCCAGCGTGGTGTGCCTGC |
| | TGAACAACTTCTACCCCCGGGAGGCCAAGGTGCAGTGGAAGGTGGACAAC |
| | GCCCTGCAGAGCGGCAACAGCCAGGAGAGCGTCACCGAGCAGGACAGCA |
| | AGGACTCCACCTACAGCCTGAGCAGCACCCTGACCCTGAGCAAGGCCGAC |
| | TACGAGAAGCATAAGGTGTACGCCTGCGAGGTGACCCACCAGGGCCTGTC |
| | CAGCCCCGTGACCAAGAGCTTCAACAGGGGCGAGTGC (SEQ ID NO: 2651) |

MOR44746D

| | |
|---|---|
| HCDR1 | GDSVSSSSAAWN (SEQ ID NO: 2623) |
| (Combined) | |
| HCDR2 | HIGYRSKWYNEYAVSVKS (SEQ ID NO: 2624) |
| (Combined) | |
| HCDR3 | GMYGSVPYKEGYYFDI (SEQ ID NO: 2625) |
| (Combined) | |
| HCDR1 | SSSAAWN (SEQ ID NO: 2626) |
| (Kabat) | |
| HCDR2 | HIGYRSKWYNEYAVSVKS (SEQ ID NO: 2624) |
| (Kabat) | |
| HCDR3 | GMYGSVPYKEGYYFDI (SEQ ID NO: 2625) |
| (Kabat) | |
| HCDR1 | GDSVSSSSA (SEQ ID NO: 2627) |
| (Chothia) | |
| HCDR2 | GYRSKWY (SEQ ID NO: 2628) |
| (Chothia) | |
| HCDR3 | GMYGSVPYKEGYYFDI (SEQ ID NO: 2625) |
| (Chothia) | |
| HCDR1 | GDSVSSSSAA (SEQ ID NO: 2629) |
| (IMGT) | |
| HCDR2 | IGYRSKWYN (SEQ ID NO: 2630) |
| (IMGT) | |
| HCDR3 | ARGMYGSVPYKEGYYFDI (SEQ ID NO: 2631) |
| (IMGT) | |
| VH | QVQLQQSGPGLVKPSQTLSLTCAISGDSVSSSSAAWNWIRQSPSRGLEWLGHI |
| | GYRSKWYNEYAVSVKSRITINPDTSKNQFSLQLNSVTPEDTAVYYCARGMYG |
| | SVPYKEGYYFDIWGQGTLVTVSS (SEQ ID NO: 2632) |
| DNA VH | CAAGTGCAACTCCAGCAGTCAGGACCGGGGTTGGTCAAGCCTTCGCAGAC |
| | CCTGTCCCTCACTTGCGCCATTAGCGGAGATTCGGTGTCGTCGTCGTCAGC |
| | CGCCTGGAACTGGATTAGACAGTCCCCTTCCCGAGGGCTGGAGTGGCTGGG |
| | CCACATCGGATACCGCAGCAAGTGGTACAACGAATACGCCGTCAGCGTGA |
| | AGTCACGCATCACCATCAACCCGGATACTAGCAAGAACCAGTTCAGCCTCC |
| | AGTTGAACTCCGTGACCCCGGAGGATACCGCCGTGTACTACTGTGCGCGGG |
| | GCATGTACGGATCCGTGCCGTACAAGGAGGGATACTACTTCGACATTTGGG |
| | GCCAGGGGACTCTTGTCACCGTGTCCTCG (SEQ ID NO: 2647) |
| Heavy Chain | QVQLQQSGPGLVKPSQTLSLTCAISGDSVSSSSAAWNWIRQSPSRGLEWLGHI |
| | GYRSKWYNEYAVSVKSRITINPDTSKNQFSLQLNSVTPEDTAVYYCARGMYG |
| | SVPYKEGYYFDIWGQGTLVTVSSASTKGPSVFPLAPSSKSTSGGTAALGCLVK |
| | DYFPEPVTVSWNSGALTSGVHTFPAVLQSSGLYSLSSVVTVPSSSLGTQTYICN |
| | VNHKPSNTKVDKRVEPKSCDKTHTCPPCPAPELLGGPSVFLFPPKPKDTLMISR |
| | TPEVTCVVVDVSHEDPEVKFNWYVDGVEVHNAKTKPREEQYNSTYRVVSVL |
| | TVLHQDWLNGKEYKCKVSNKALPAPIEKTISKAKGQPREPQVYTLPPSREEMT |
| | KNQVSLTCLVKGFYPSDIAVEWESNGQPENNYKTTPPVLDSDGSFFLYSKLTV |
| | DKSRWQQGNVFSCSVLHEALHSHYTQKSLSLSPGK (SEQ ID NO: 2654) |
| DNA Heavy | CAAGTGCAACTCCAGCAGTCAGGACCGGGGTTGGTCAAGCCTTCGCAGAC |
| Chain | CCTGTCCCTCACTTGCGCCATTAGCGGAGATTCGGTGTCGTCGTCGTCAGC |
| | CGCCTGGAACTGGATTAGACAGTCCCCTTCCCGAGGGCTGGAGTGGCTGGG |
| | CCACATCGGATACCGCAGCAAGTGGTACAACGAATACGCCGTCAGCGTGA |
| | AGTCACGCATCACCATCAACCCGGATACTAGCAAGAACCAGTTCAGCCTCC |
| | AGTTGAACTCCGTGACCCCGGAGGATACCGCCGTGTACTACTGTGCGCGGG |
| | GCATGTACGGATCCGTGCCGTACAAGGAGGGATACTACTTCGACATTTGGG |
| | GCCAGGGGACTCTTGTCACCGTGTCCTCGGCCTCCACTAAGGGCCCGTCAG |
| | TGTTCCCCCTTGCGCCATCCTCGAAGTCAACCTCCGGAGGAACTGCCGCAC |
| | TGGGTTGCCTCGTGAAAGACTATTTCCCGGAACCCGTCACTGTCTCCTGGA |
| | ACTCAGGAGCGCTCACCAGCGGAGTGCATACCTTTCCTGCGGTGCTGCAGT |
| | CCAGCGGCCTGTACTCCCTGAGCTCCGTCGTGACCGTCCCCTCGTCGTCCCT |
| | GGGAACCCAAACCTACATTTGCAACGTCAATCACAAGCCAAGCAACACTA |
| | AGGTGGACAAGAGAGTGGAGCCCAAGTCCTGCGATAAGACCCACACCTGT |
| | CCTCCCTGTCCGGCACCTGAACTGCTTGGTGGACCTTCCGTGTTCCTGTTCC |
| | CGCCCAAGCCAAAAGACACCCTGATGATCTCCCGCACTCCGGAAGTCACTT |
| | GCGTGGTCGTGGACGTGTCCCACGAGGACCCCGAGGTCAAGTTTAATTGGT |
| | ACGTGGACGGAGTGGAAGTGCACAACGCCAAGACCAAGCCGCGGGAAGA |
| | ACAGTACAACTCCACCTACCGCGTGGTGTCCGTCCTGACTGTGCTCCACCA |
| | GGACTGGCTGAACGGAAAGGAGTACAAGTGCAAAGTGTCCAACAAGGCAC |
| | TGCCAGCCCCTATCGAAAAGACTATCTCCAAGGCCAAGGGCCAACCTAGG |
| | GAGCCCCAGGTGTACACGTTGCCTCCTTCCCGCGAAGAAATGACTAAGAAC |
| | CAGGTGTCGCTGACCTGTCTCGTGAAAGGGTTCTACCCCTCTGACATCGCC |
| | GTGGAATGGGAGTCAAACGGACAGCCTGAGAACAACTATAAGACCACACC |
| | ACCTGTCCTGGACTCCGACGGCTCCTTCTTCCTGTACTCAAAGTTGACCGTG |
| | GACAAGTCGCGGTGGCAACAGGGCAACGTGTTCTCTTGCTCCGTGCTGCAC |
| | GAAGCCCTGCACAGCCACTACACCCAAAAGTCGCTCAGCCTCTCCCCCGGA |
| | AAG (SEQ ID NO: 2655) |
| LCDR1 | RASQGISSDLN (SEQ ID NO: 2636) |
| (Combined) | |
| LCDR2 | AASNLQS (SEQ ID NO: 2637) |
| (Combined) | |
| LCDR3 | QQYTDESMT (SEQ ID NO: 2638) |
| (Combined) | |
| LCDR1 | RASQGISSDLN (SEQ ID NO: 2636) |
| (Kabat) | |
| LCDR2 | AASNLQS (SEQ ID NO: 2637) |
| (Kabat) | |
| LCDR3 | QQYTDESMT (SEQ ID NO: 2638) |
| (Kabat) | |
| LCDR1 | SQGISSD (SEQ ID NO: 2639) |
| (Chothia) | |
| LCDR2 | AAS (SEQ ID NO: 2640) |
| (Chothia) | |
| LCDR3 | YTDESM (SEQ ID NO: 2641) |
| (Chothia) | |
| LCDR1 | QGISSD (SEQ ID NO: 2642) |
| (IMGT) | |
| LCDR2 | AAS (SEQ ID NO: 2640) |
| (IMGT) | |
| LCDR3 | QQYTDESMT (SEQ ID NO: 2638) |
| (IMGT) | |
| VL | DIQMTQSPSSLSASVGDRVTITCRASQGISSDLNWYQQKPGKAPKLLIYAASNL |
| | QSGVPSRFSGSGSGTDFTLTISSLQPEDFATYYCQQYTDESMTFGQGTKVEIK |
| | (SEQ ID NO: 2643) |
| DNA VL | GACATTCAGATGACCCAGTCCCCGTCGTCCCTGTCCGCATCCGTGGGCGAC |
| | AGAGTCACCATCACTTGCCGGGCCTCACAGGGAATTTCCTCCGACCTGAAC |
| | TGGTATCAGCAGAAGCCTGGAAAGGCCCCGAAGCTGCTGATCTACGCCGC |
| | GTCCAACTTGCAATCGGGAGTGCCAAGCCGCTTTTCTGGTTCCGGGAGCGG |
| | GACTGACTTCACCCTGACTATTAGCAGCCTGCAGCCCGAAGATTTCGCTAC |
| | CTACTACTGCCAACAGTACACAGATGAATCCATGACCTTCGGACAGGGCAC |
| | CAAAGTCGAGATCAAG (SEQ ID NO: 2650) |
| Light Chain | DIQMTQSPSSLSASVGDRVTITCRASQGISSDLNWYQQKPGKAPKLLIYAASNL |
| | QSGVPSRFSGSGSGTDFTLTISSLQPEDFATYYCQQYTDESMTFGQGTKVEIKR |
| | TVAAPSVFIFPPSDEQLKSGTASVVCLLNNFYPREAKVQWKVDNALQSGNSQE |
| | SVTEQDSKDSTYSLSSTLTLSKADYEKHKVYACEVTHQGLSSPVTKSFNRGEC |
| | (SEQ ID NO: 2645) |
| DNA Light | GACATTCAGATGACCCAGTCCCCGTCGTCCCTGTCCGCATCCGTGGGCGAC |
| Chain | AGAGTCACCATCACTTGCCGGGCCTCACAGGGAATTTCCTCCGACCTGAAC |
| | TGGTATCAGCAGAAGCCTGGAAAGGCCCCGAAGCTGCTGATCTACGCCGC |
| | GTCCAACTTGCAATCGGGAGTGCCAAGCCGCTTTTCTGGTTCCGGGAGCGG |
| | GACTGACTTCACCCTGACTATTAGCAGCCTGCAGCCCGAAGATTTCGCTAC |
| | CTACTACTGCCAACAGTACACAGATGAATCCATGACCTTCGGACAGGGCAC |
| | CAAAGTCGAGATCAAGCGTACGGTGGCCGCTCCCAGCGTGTTCATCTTCCC |
| | CCCCAGCGACGAGCAGCTGAAGAGCGGCACCGCCAGCGTGGTGTGCCTGC |
| | TGAACAACTTCTACCCCCGGGAGGCCAAGGTGCAGTGGAAGGTGGACAAC |
| | GCCCTGCAGAGCGGCAACAGCCAGGAGAGCGTCACCGAGCAGGACAGCA |
| | AGGACTCCACCTACAGCCTGAGCAGCACCCTGACCCTGAGCAAGGCCGAC |
| | TACGAGAAGCATAAGGTGTACGCCTGCGAGGTGACCCACCAGGGCCTGTC |
| | CAGCCCCGTGACCAAGAGCTTCAACAGGGGCGAGTGC (SEQ ID NO: 2651) |

MOR44746E

| | |
|---|---|
| HCDR1 | GDSVSSSSAAWN (SEQ ID NO: 2623) |
| (Combined) | |
| HCDR2 | HIGYRSKWYNEYAVSVKS (SEQ ID NO: 2624) |
| (Combined) | |
| HCDR3 | GMYGSVPYKEGYYFDI (SEQ ID NO: 2625) |
| (Combined) | |
| HCDR1 | SSSAAWN (SEQ ID NO: 2626) |
| (Kabat) | |
| HCDR2 | HIGYRSKWYNEYAVSVKS (SEQ ID NO: 2624) |
| (Kabat) | |
| HCDR3 | GMYGSVPYKEGYYFDI (SEQ ID NO: 2625) |
| (Kabat) | |
| HCDR1 | GDSVSSSSA (SEQ ID NO: 2627) |
| (Chothia) | |
| HCDR2 | GYRSKWY (SEQ ID NO: 2628) |
| (Chothia) | |
| HCDR3 | GMYGSVPYKEGYYFDI (SEQ ID NO: 2625) |
| (Chothia) | |
| HCDR1 | GDSVSSSSAA (SEQ ID NO: 2629) |
| (IMGT) | |
| HCDR2 | IGYRSKWYN (SEQ ID NO: 2630) |
| (IMGT) | |
| HCDR3 | ARGMYGSVPYKEGYYFDI (SEQ ID NO: 2631) |
| (IMGT) | |
| VH | QVQLQQSGPGLVKPSQTLSLTCAISGDSVSSSSAAWNWIRQSPSRGLEWLGHI |
| | GYRSKWYNEYAVSVKSRITINPDTSKNQFSLQLNSVTPEDTAVYYCARGMYG |
| | SVPYKEGYYFDIWGQGTLVTVSS (SEQ ID NO: 2632) |
| DNA VH | CAAGTGCAACTCCAGCAGTCAGGACCGGGGTTGGTCAAGCCTTCGCAGAC |
| | CCTGTCCCTCACTTGCGCCATTAGCGGAGATTCGGTGTCGTCGTCGTCAGC |
| | CGCCTGGAACTGGATTAGACAGTCCCCTTCCCGAGGGCTGGAGTGGCTGGG |
| | CCACATCGGATACCGCAGCAAGTGGTACAACGAATACGCCGTCAGCGTGA |
| | AGTCACGCATCACCATCAACCCGGATACTAGCAAGAACCAGTTCAGCCTCC |
| | AGTTGAACTCCGTGACCCCGGAGGATACCGCCGTGTACTACTGTGCGCGGG |
| | GCATGTACGGATCCGTGCCGTACAAGGAGGGATACTACTTCGACATTTGGG |
| | GCCAGGGGACTCTTGTCACCGTGTCCTCG (SEQ ID NO: 2647) |
| Heavy Chain | QVQLQQSGPGLVKPSQTLSLTCAISGDSVSSSSAAWNWIRQSPSRGLEWLGHI |
| | GYRSKWYNEYAVSVKSRITINPDTSKNQFSLQLNSVTPEDTAVYYCARGMYG |
| | SVPYKEGYYFDIWGQGTLVTVSSASTKGPSVFPLAPSSKSTSGGTAALGCLVK |
| | DYFPEPVTVSWNSGALTSGVHTFPAVLQSSGLYSLSSVVTVPSSSLGTQTYICN |
| | VNHKPSNTKVDKRVEPKSCDKTHTCPPCPAPELLGGPSVFLFPPKPKDTLMISR |
| | TPEVTCVVVAVSHEDPEVKFNWYVDGVEVHNAKTKPREEQYNSTYRVVSVL |
| | TVLHQDWLNGKEYKCKVSNKALAAPIEKTISKAKGQPREPQVYTLPPSREEMT |
| | KNQVSLTCLVKGFYPSDIAVEWESNGQPENNYKTTPPVLDSDGSFFLYSKLTV |
| | DKSRWQQGNVFSCSVLHEALHSHYTQKSLSLSPGK (SEQ ID NO: 2656) |
| DNA Heavy | CAAGTGCAACTCCAGCAGTCAGGACCGGGGTTGGTCAAGCCTTCGCAGAC |
| Chain | CCTGTCCCTCACTTGCGCCATTAGCGGAGATTCGGTGTCGTCGTCGTCAGC |
| | CGCCTGGAACTGGATTAGACAGTCCCCTTCCCGAGGGCTGGAGTGGCTGGG |
| | CCACATCGGATACCGCAGCAAGTGGTACAACGAATACGCCGTCAGCGTGA |
| | AGTCACGCATCACCATCAACCCGGATACTAGCAAGAACCAGTTCAGCCTCC |
| | AGTTGAACTCCGTGACCCCGGAGGATACCGCCGTGTACTACTGTGCGCGGG |
| | GCATGTACGGATCCGTGCCGTACAAGGAGGGATACTACTTCGACATTTGGG |
| | GCCAGGGGACTCTTGTCACCGTGTCCTCGGCCTCCACTAAGGGCCCGTCAG |
| | TGTTCCCCCTTGCGCCATCCTCGAAGTCAACCTCCGGAGGAACTGCCGCAC |
| | TGGGTTGCCTCGTGAAAGACTATTTCCCGGAACCCGTCACTGTCTCCTGGA |
| | ACTCAGGAGCGCTCACCAGCGGAGTGCATACCTTTCCTGCGGTGCTGCAGT |
| | CCAGCGGCCTGTACTCCCTGAGCTCCGTCGTGACCGTCCCCTCGTCGTCCCT |
| | GGGAACCCAAACCTACATTTGCAACGTCAATCACAAGCCAAGCAACACTA |
| | AGGTGGACAAGAGAGTGGAGCCCAAGTCCTGCGATAAGACCCACACCTGT |
| | CCTCCCTGTCCGGCACCTGAACTGCTTGGTGGACCTTCCGTGTTCCTGTTCC |
| | CGCCCAAGCCAAAAGACACCCTGATGATCTCCCGCACTCCGGAAGTCACTT |
| | GCGTGGTCGTGGCCGTGTCCCACGAGGACCCCGAGGTCAAGTTTAATTGGT |
| | ACGTGGACGGAGTGGAAGTGCACAACGCCAAGACCAAGCCGCGGGAAGA |
| | ACAGTACAACTCCACCTACCGCGTGGTGTCCGTCCTGACTGTGCTCCACCA |
| | GGACTGGCTGAACGGAAAGGAGTACAAGTGCAAAGTGTCCAACAAGGCAC |
| | TGGCTGCCCCTATCGAAAAGACTATCTCCAAGGCCAAGGGCCAACCTAGG |
| | GAGCCCCAGGTGTACACGTTGCCTCCTTCCCGCGAAGAAATGACTAAGAAC |
| | CAGGTGTCGCTGACCTGTCTCGTGAAAGGGTTCTACCCCTCTGACATCGCC |
| | GTGGAATGGGAGTCAAACGGACAGCCTGAGAACAACTATAAGACCACACC |
| | ACCTGTCCTGGACTCCGACGGCTCCTTCTTCCTGTACTCAAAGTTGACCGTG |
| | GACAAGTCGCGGTGGCAACAGGGCAACGTGTTCTCTTGCTCCGTGCTGCAC |
| | GAAGCCCTGCACAGCCACTACACCCAAAAGTCGCTCAGCCTCTCCCCCGGA |
| | AAG (SEQ ID NO: 2657) |
| LCDR1 | RASQGISSDLN (SEQ ID NO: 2636) |
| (Combined) | |
| LCDR2 | AASNLQS (SEQ ID NO: 2637) |
| (Combined) | |
| LCDR3 | QQYTDESMT (SEQ ID NO: 2638) |
| (Combined) | |
| LCDR1 | RASQGISSDLN (SEQ ID NO: 2636) |
| (Kabat) | |
| LCDR2 | AASNLQS (SEQ ID NO: 2637) |
| (Kabat) | |
| LCDR3 | QQYTDESMT (SEQ ID NO: 2638) |
| (Kabat) | |
| LCDR1 | SQGISSD (SEQ ID NO: 2639) |
| (Chothia) | |
| LCDR2 | AAS (SEQ ID NO: 2640) |
| (Chothia) | |
| LCDR3 | YTDESM (SEQ ID NO: 2641) |
| (Chothia) | |
| LCDR1 | QGISSD (SEQ ID NO: 2642) |
| (IMGT) | |
| LCDR2 | AAS (SEQ ID NO: 2640) |
| (IMGT) | |
| LCDR3 | QQYTDESMT (SEQ ID NO: 2638) |
| (IMGT) | |
| VL | DIQMTQSPSSLSASVGDRVTITCRASQGISSDLNWYQQKPGKAPKLLIYAASNL |
| | (SEQ ID NO: 2643) |
| DNA VL | GACATTCAGATGACCCAGTCCCCGTCGTCCCTGTCCGCATCCGTGGGCGAC |
| | AGAGTCACCATCACTTGCCGGGCCTCACAGGGAATTTCCTCCGACCTGAAC |
| | TGGTATCAGCAGAAGCCTGGAAAGGCCCCGAAGCTGCTGATCTACGCCGC |
| | GTCCAACTTGCAATCGGGAGTGCCAAGCCGCTTTTCTGGTTCCGGGAGCGG |
| | GACTGACTTCACCCTGACTATTAGCAGCCTGCAGCCCGAAGATTTCGCTAC |
| | CTACTACTGCCAACAGTACACAGATGAATCCATGACCTTCGGACAGGGCAC |
| | CAAAGTCGAGATCAAG (SEQ ID NO: 2650) |
| Light Chain | DIQMTQSPSSLSASVGDRVTITCRASQGISSDLNWYQQKPGKAPKLLIYAASNL |
| | QSGVPSRFSGSGSGTDFTLTISSLQPEDFATYYCQQYTDESMTFGQGTKVEIKR |
| | TVAAPSVFIFPPSDEQLKSGTASVVCLLNNFYPREAKVQWKVDNALQSGNSQE |
| | SVTEQDSKDSTYSLSSTLTLSKADYEKHKVYACEVTHQGLSSPVTKSFNRGEC |
| | (SEQ ID NO: 2645) |
| DNA Light | GACATTCAGATGACCCAGTCCCCGTCGTCCCTGTCCGCATCCGTGGGCGAC |
| Chain | AGAGTCACCATCACTTGCCGGGCCTCACAGGGAATTTCCTCCGACCTGAAC |
| | TGGTATCAGCAGAAGCCTGGAAAGGCCCCGAAGCTGCTGATCTACGCCGC |
| | GTCCAACTTGCAATCGGGAGTGCCAAGCCGCTTTTCTGGTTCCGGGAGCGG |
| | GACTGACTTCACCCTGACTATTAGCAGCCTGCAGCCCGAAGATTTCGCTAC |
| | CTACTACTGCCAACAGTACACAGATGAATCCATGACCTTCGGACAGGGCAC |
| | CAAAGTCGAGATCAAGCGTACGGTGGCCGCTCCCAGCGTGTTCATCTTCCC |
| | CCCCAGCGACGAGCAGCTGAAGAGCGGCACCGCCAGCGTGGTGTGCCTGC |
| | TGAACAACTTCTACCCCCGGGAGGCCAAGGTGCAGTGGAAGGTGGACAAC |
| | GCCCTGCAGAGCGGCAACAGCCAGGAGAGCGTCACCGAGCAGGACAGCA |
| | AGGACTCCACCTACAGCCTGAGCAGCACCCTGACCCTGAGCAAGGCCGAC |
| | TACGAGAAGCATAAGGTGTACGCCTGCGAGGTGACCCACCAGGGCCTGTC |
| | CAGCCCCGTGACCAAGAGCTTCAACAGGGGCGAGTGC (SEQ ID NO: 2651) |

MOR44746F

| | |
|---|---|
| HCDR1 | GDSVSSSSAAWN (SEQ ID NO: 2623) |
| (Combined) | |
| HCDR2 | HIGYRSKWYNEYAVSVKS (SEQ ID NO: 2624) |
| (Combined) | |
| HCDR3 | GMYGSVPYKEGYYFDI (SEQ ID NO: 2625) |
| (Combined) | |
| HCDR1 | SSSAAWN (SEQ ID NO: 2626) |
| (Kabat) | |
| HCDR2 | HIGYRSKWYNEYAVSVKS (SEQ ID NO: 2624) |
| (Kabat) | |
| HCDR3 | GMYGSVPYKEGYYFDI (SEQ ID NO: 2625) |
| (Kabat) | |
| HCDR1 | GDSVSSSSA (SEQ ID NO: 2627) |
| (Chothia) | |
| HCDR2 | GYRSKWY (SEQ ID NO: 2628) |
| (Chothia) | |
| HCDR3 | GMYGSVPYKEGYYFDI (SEQ ID NO: 2625) |
| (Chothia) | |
| HCDR1 | GDSVSSSSAA (SEQ ID NO: 2629) |
| (IMGT) | |
| HCDR2 | IGYRSKWYN (SEQ ID NO: 2630) |
| (IMGT) | |
| HCDR3 | ARGMYGSVPYKEGYYFDI (SEQ ID NO: 2631) |
| (IMGT) | |
| VH | QVQLQQSGPGLVKPSQTLSLTCAISGDSVSSSSAAWNWIRQSPSRGLEWLGHI |
| | GYRSKWYNEYAVSVKSRITINPDTSKNQFSLQLNSVTPEDTAVYYCARGMYG |
| | SVPYKEGYYFDIWGQGTLVTVSS (SEQ ID NO: 2632) |
| DNA VH | CAAGTGCAACTCCAGCAGTCAGGACCGGGGTTGGTCAAGCCTTCGCAGAC |
| | CCTGTCCCTCACTTGCGCCATTAGCGGAGATTCGGTGTCGTCGTCGTCAGC |
| | CGCCTGGAACTGGATTAGACAGTCCCCTTCCCGAGGGCTGGAGTGGCTGGG |
| | CCACATCGGATACCGCAGCAAGTGGTACAACGAATACGCCGTCAGCGTGA |
| | AGTCACGCATCACCATCAACCCGGATACTAGCAAGAACCAGTTCAGCCTCC |
| | AGTTGAACTCCGTGACCCCGGAGGATACCGCCGTGTACTACTGTGCGCGGG |
| | GCATGTACGGATCCGTGCCGTACAAGGAGGGATACTACTTCGACATTTGGG |
| | GCCAGGGGACTCTTGTCACCGTGTCCTCG (SEQ ID NO: 2647) |
| Heavy Chain | QVQLQQSGPGLVKPSQTLSLTCAISGDSVSSSSAAWNWIRQSPSRGLEWLGHI |
| | GYRSKWYNEYAVSVKSRITINPDTSKNQFSLQLNSVTPEDTAVYYCARGMYG |
| | SVPYKEGYYFDIWGQGTLVTVSSASTKGPSVFPLAPSSKSTSGGTAALGCLVK |
| | DYFPEPVTVSWNSGALTSGVHTFPAVLQSSGLYSLSSVVTVPSSSLGTQTYICN |
| | VNHKPSNTKVDKRVEPKSCDKTHTCPPCPAPELLGGPSVFLFPPKPKDTLYITR |
| | EPEVTCVVVDVSHEDPEVKFNWYVDGVEVHNAKTKPREEQYNSTYRVVSVL |
| | TVLHQDWLNGKEYKCKVSNKALPAPIEKTISKAKGQPREPQVYTLPPSREEMT |
| | KNQVSLTCLVKGFYPSDIAVEWESNGQPENNYKTTPPVLDSDGSFFLYSKLTV |
| | DKSRWQQGNVFSCSVMHEALHNHYTQKSLSLSPGK (SEQ ID NO: 2658) |
| DNA Heavy | CAAGTGCAACTCCAGCAGTCAGGACCGGGGTTGGTCAAGCCTTCGCAGAC |
| Chain | CCTGTCCCTCACTTGCGCCATTAGCGGAGATTCGGTGTCGTCGTCGTCAGC |
| | CGCCTGGAACTGGATTAGACAGTCCCCTTCCCGAGGGCTGGAGTGGCTGGG |
| | CCACATCGGATACCGCAGCAAGTGGTACAACGAATACGCCGTCAGCGTGA |
| | AGTCACGCATCACCATCAACCCGGATACTAGCAAGAACCAGTTCAGCCTCC |
| | AGTTGAACTCCGTGACCCCGGAGGATACCGCCGTGTACTACTGTGCGCGGG |
| | GCATGTACGGATCCGTGCCGTACAAGGAGGGATACTACTTCGACATTTGGG |
| | GCCAGGGGACTCTTGTCACCGTGTCCTCGGCCTCCACTAAGGGCCCGTCAG |
| | TGTTCCCCCTTGCGCCATCCTCGAAGTCAACCTCCGGAGGAACTGCCGCAC |
| | TGGGTTGCCTCGTGAAAGACTATTTCCCGGAACCCGTCACTGTCTCCTGGA |
| | ACTCAGGAGCGCTCACCAGCGGAGTGCATACCTTTCCTGCGGTGCTGCAGT |
| | CCAGCGGCCTGTACTCCCTGAGCTCCGTCGTGACCGTCCCCTCGTCGTCCCT |
| | GGGAACCCAAACCTACATTTGCAACGTCAATCACAAGCCAAGCAACACTA |
| | AGGTGGACAAGAGAGTGGAGCCCAAGTCCTGCGATAAGACCCACACCTGT |
| | CCTCCCTGTCCGGCACCTGAACTGCTTGGTGGACCTTCCGTGTTCCTGTTCC |
| | CGCCCAAGCCAAAAGACACCCTGTATATCACTCGCGAACCGGAAGTCACTT |
| | GCGTGGTCGTGGACGTGTCCCACGAGGACCCCGAGGTCAAGTTTAATTGGT |
| | ACGTGGACGGAGTGGAAGTGCACAACGCCAAGACCAAGCCGCGGGAAGA |
| | ACAGTACAACTCCACCTACCGCGTGGTGTCCGTCCTGACTGTGCTCCACCA |
| | GGACTGGCTGAACGGAAAGGAGTACAAGTGCAAAGTGTCCAACAAGGCAC |
| | TGCCAGCCCCTATCGAAAAGACTATCTCCAAGGCCAAGGGCCAACCTAGG |
| | GAGCCCCAGGTGTACACGTTGCCTCCTTCCCGCGAAGAAATGACTAAGAAC |
| | CAGGTGTCGCTGACCTGTCTCGTGAAAGGGTTCTACCCCTCTGACATCGCC |
| | GTGGAATGGGAGTCAAACGGACAGCCTGAGAACAACTATAAGACCACACC |
| | ACCTGTCCTGGACTCCGACGGCTCCTTCTTCCTGTACTCAAAGTTGACCGTG |
| | GACAAGTCGCGGTGGCAACAGGGCAACGTGTTCTCTTGCTCCGTGATGCAC |
| | GAAGCCCTGCACAACCACTACACCCAAAAGTCGCTCAGCCTCTCCCCCGGA |
| | AAG (SEQ ID NO: 2659) |
| LCDR1 | RASQGISSDLN (SEQ ID NO: 2636) |
| (Combined) | |
| LCDR2 | AASNLQS (SEQ ID NO: 2637) |
| (Combined) | |
| LCDR3 | QQYTDESMT (SEQ ID NO: 2638) |
| (Combined) | |
| LCDR1 | RASQGISSDLN (SEQ ID NO: 2636) |
| (Kabat) | |
| LCDR2 | AASNLQS (SEQ ID NO: 2637) |
| (Kabat) | |
| LCDR3 | QQYTDESMT (SEQ ID NO: 2638) |
| (Kabat) | |
| LCDR1 | SQGISSD (SEQ ID NO: 2639) |
| (Chothia) | |
| LCDR2 | AAS (SEQ ID NO: 2640) |
| (Chothia) | |
| LCDR3 | YTDESM (SEQ ID NO: 2641) |
| (Chothia) | |
| LCDR1 | QGISSD (SEQ ID NO: 2642) |
| (IMGT) | |
| LCDR2 | AAS (SEQ ID NO: 2640) |
| (IMGT) | |
| LCDR3 | QQYTDESMT (SEQ ID NO: 2638) |
| (IMGT) | |
| VL | DIQMTQSPSSLSASVGDRVTITCRASQGISSDLNWYQQKPGKAPKLLIYAASNL |
| | QSGVPSRFSGSGSGTDFTLTISSLQPEDFATYYCQQYTDESMTFGQGTKVEIK |
| | (SEQ ID NO: 2643) |
| DNA VL | GACATTCAGATGACCCAGTCCCCGTCGTCCCTGTCCGCATCCGTGGGCGAC |
| | AGAGTCACCATCACTTGCCGGGCCTCACAGGGAATTTCCTCCGACCTGAAC |
| | TGGTATCAGCAGAAGCCTGGAAAGGCCCCGAAGCTGCTGATCTACGCCGC |
| | GTCCAACTTGCAATCGGGAGTGCCAAGCCGCTTTTCTGGTTCCGGGAGCGG |
| | GACTGACTTCACCCTGACTATTAGCAGCCTGCAGCCCGAAGATTTCGCTAC |
| | CTACTACTGCCAACAGTACACAGATGAATCCATGACCTTCGGACAGGGCAC |
| | CAAAGTCGAGATCAAG (SEQ ID NO: 2650) |
| Light Chain | DIQMTQSPSSLSASVGDRVTITCRASQGISSDLNWYQQKPGKAPKLLIYAASNL |
| | QSGVPSRFSGSGSGTDFTLTISSLQPEDFATYYCQQYTDESMTFGQGTKVEIKR |
| | TVAAPSVFIFPPSDEQLKSGTASVVCLLNNFYPREAKVQWKVDNALQSGNSQE |
| | SVTEQDSKDSTYSLSSTLTLSKADYEKHKVYACEVTHQGLSSPVTKSFNRGEC |
| | (SEQ ID NO: 2645) |
| DNA Light | GACATTCAGATGACCCAGTCCCCGTCGTCCCTGTCCGCATCCGTGGGCGAC |
| Chain | AGAGTCACCATCACTTGCCGGGCCTCACAGGGAATTTCCTCCGACCTGAAC |
| | TGGTATCAGCAGAAGCCTGGAAAGGCCCCGAAGCTGCTGATCTACGCCGC |
| | GTCCAACTTGCAATCGGGAGTGCCAAGCCGCTTTTCTGGTTCCGGGAGCGG |
| | GACTGACTTCACCCTGACTATTAGCAGCCTGCAGCCCGAAGATTTCGCTAC |
| | CTACTACTGCCAACAGTACACAGATGAATCCATGACCTTCGGACAGGGCAC |
| | CAAAGTCGAGATCAAGCGTACGGTGGCCGCTCCCAGCGTGTTCATCTTCCC |
| | CCCCAGCGACGAGCAGCTGAAGAGCGGCACCGCCAGCGTGGTGTGCCTGC |
| | TGAACAACTTCTACCCCCGGGAGGCCAAGGTGCAGTGGAAGGTGGACAAC |
| | GCCCTGCAGAGCGGCAACAGCCAGGAGAGCGTCACCGAGCAGGACAGCA |
| | AGGACTCCACCTACAGCCTGAGCAGCACCCTGACCCTGAGCAAGGCCGAC |
| | TACGAGAAGCATAAGGTGTACGCCTGCGAGGTGACCCACCAGGGCCTGTC |
| | CAGCCCCGTGACCAAGAGCTTCAACAGGGGCGAGTGC (SEQ ID NO: 2651) |

MOR042596

| | |
|---|---|
| HCDR1 | GYTFTGYHMS (SEQ ID NO: 2586) |
| (Combined) | |
| HCDR2 | VINPVSGNTVYAQKFQG (SEQ ID NO: 2587) |
| (Combined) | |
| HCDR3 | IPSYTYAFDY (SEQ ID NO: 2588) |
| (Combined) | |
| HCDR1 | GYHMS (SEQ ID NO: 2589) |
| (Kabat) | |
| HCDR2 | VINPVSGNTVYAQKFQG (SEQ ID NO: 2587) |
| (Kabat) | |
| HCDR3 | IPSYTYAFDY (SEQ ID NO: 2588) |
| (Kabat) | |
| HCDR1 | GYTFTGY (SEQ ID NO: 2590) |
| (Chothia) | |
| HCDR2 | NPVSGN (SEQ ID NO: 2591) |
| (Chothia) | |
| HCDR3 | IPSYTYAFDY (SEQ ID NO: 2588) |
| (Chothia) | |
| HCDR1 | GYTFTGYH (SEQ ID NO: 2592) |
| (IMGT) | |
| HCDR2 | INPVSGNT (SEQ ID NO: 2593) |
| (IMGT) | |
| HCDR3 | ARIPSYTYAFDY (SEQ ID NO: 2594) |
| (IMGT) | |
| VH | QVQLVQSGAEVKKPGASVKVSCKASGYTFTGYHMSWVRQAPGQGLEWMGV |
| | INPVSGNTVYAQKFQGRVTMTRDTSISTAYMELSRLRSEDTAVYYCARIPSYT |
| | YAFDYWGQGTLVTVSS (SEQ ID NO: 2595) |
| DNA VH | CAGGTGCAATTGGTGCAGAGCGGTGCGGAAGTGAAAAAACCGGGTGCCAG |
| | CGTGAAAGTTAGCTGCAAAGCGTCCGGATATACCTTCACTGGTTACCATAT |
| | GTCTTGGGTGCGCCAGGCCCCGGGCCAGGGCCTCGAGTGGATGGGCGTTAT |
| | CAACCCGGTTTCTGGCAACACGGTTTACGCGCAGAAATTTCAGGGCCGGGT |
| | GACCATGACCCGTGATACCAGCATTAGCACCGCGTATATGGAACTGAGCC |
| | GTCTGCGTAGCGAAGATACGGCCGTGTATTATTGCGCGCGTATCCCGTCTT |
| | ACACTTACGCTTTCGATTACTGGGGCCAAGGCACCCTGGTGACTGTTAGCT |
| | CA (SEQ ID NO: 2596) |
| Heavy Chain | QVQLVQSGAEVKKPGASVKVSCKASGYTFTGYHMSWVRQAPGQGLEWMGV |
| | INPVSGNTVYAQKFQGRVTMTRDTSISTAYMELSRLRSEDTAVYYCARIPSYT |
| | YAFDYWGQGTLVTVSSASTKGPSVFPLAPSSKSTSGGTAALGCLVKDYFPEPV |
| | TVSWNSGALTSGVHTFPAVLQSSGLYSLSSVVTVPSSSLGTQTYICNVNHKPSN |
| | TKVDKRVEPKSCDKTHTCPPCPAPEAAGGPSVFLFPPKPKDTLMISRTPEVTCV |
| | VVDVSHEDPEVKFNWYVDGVEVHNAKTKPREEQYNSTYRVVSVLTVLHQD |
| | WLNGKEYKCKVSNKALPAPIEKTISKAKGQPREPQVYTLPPSREEMTKNQVSL |
| | TCLVKGFYPSDIAVEWESNGQPENNYKTTPPVLDSDGSFFLYSKLTVDKSRWQ |
| | QGNVFSCSVMHEALHNHYTQKSLSLSPGK (SEQ ID NO: 2597) |
| DNA Heavy | CAGGTGCAATTGGTGCAGAGCGGTGCGGAAGTGAAAAAACCGGGTGCCAG |
| Chain | CGTGAAAGTTAGCTGCAAAGCGTCCGGATATACCTTCACTGGTTACCATAT |
| | GTCTTGGGTGCGCCAGGCCCCGGGCCAGGGCCTCGAGTGGATGGGCGTTAT |
| | CAACCCGGTTTCTGGCAACACGGTTTACGCGCAGAAATTTCAGGGCCGGGT |
| | GACCATGACCCGTGATACCAGCATTAGCACCGCGTATATGGAACTGAGCC |
| | GTCTGCGTAGCGAAGATACGGCCGTGTATTATTGCGCGCGTATCCCGTCTT |
| | ACACTTACGCTTTCGATTACTGGGGCCAAGGCACCCTGGTGACTGTTAGCT |
| | CAGCCTCCACCAAGGGTCCATCGGTCTTCCCCCTGGCACCCTCCTCCAAGA |
| | GCACCTCTGGGGGCACAGCGGCCCTGGGCTGCCTGGTCAAGGACTACTTCC |
| | CCGAACCGGTGACGGTGTCGTGGAACTCAGGCGCCCTGACCAGCGGCGTG |
| | CACACCTTCCCGGCTGTCCTACAGTCCTCAGGACTCTACTCCCTCAGCAGC |
| | GTGGTGACCGTGCCCTCCAGCAGCTTGGGCACCCAGACCTACATCTGCAAC |
| | GTGAATCACAAGCCCAGCAACACCAAGGTGGACAAGAGAGTTGAGCCCAA |
| | ATCTTGTGACAAAACTCACACATGCCCACCGTGCCCAGCACCTGAAGCAGC |
| | GGGGGGACCGTCAGTCTTCCTCTTCCCCCCAAAACCCAAGGACACCCTCAT |
| | GATCTCCCGGACCCCTGAGGTCACATGCGTGGTGGTGGACGTGAGCCACG |
| | AAGACCCTGAGGTCAAGTTCAACTGGTACGTGGACGGCGTGGAGGTGCAT |
| | AATGCCAAGACAAAGCCGCGGGAGGAGCAGTACAACAGCACGTACCGGGT |
| | GGTCAGCGTCCTCACCGTCCTGCACCAGGACTGGCTGAATGGCAAGGAGT |
| | ACAAGTGCAAGGTCTCCAACAAAGCCCTCCCAGCCCCCATCGAGAAAACC |
| | ATCTCCAAAGCCAAAGGGCAGCCCCGAGAACCACAGGTGTACACCCTGCC |
| | CCCATCCCGGGAGGAGATGACCAAGAACCAGGTCAGCCTGACCTGCCTGG |
| | TCAAAGGCTTCTATCCCAGCGACATCGCCGTGGAGTGGGAGAGCAATGGG |
| | CAGCCGGAGAACAACTACAAGACCACGCCTCCCGTGCTGGACTCCGACGG |
| | CTCCTTCTTCCTCTACAGCAAGCTCACCGTGGACAAGAGCAGGTGGCAGCA |
| | GGGGAACGTCTTCTCATGCTCCGTGATGCATGAGGCTCTGCACAACCACTA |
| | CACGCAGAAGAGCCTCTCCCTGTCTCCGGGTAAA (SEQ ID NO: 2598) |
| LCDR1 | RASQDISNYLA (SEQ ID NO: 2599) |
| (Combined) | |
| LCDR2 | RASSLQS (SEQ ID NO: 2600) |
| (Combined) | |
| LCDR3 | QQHGHSPTT (SEQ ID NO: 2660) |
| (Combined) | |
| LCDR1 | RASQDISNYLA (SEQ ID NO: 2599) |
| (Kabat) | |
| LCDR2 | RASSLQS (SEQ ID NO: 2600) |
| (Kabat) | |
| LCDR3 | QQHGHSPTT (SEQ ID NO: 2660) |
| (Kabat) | |
| LCDR1 | SQDISNY (SEQ ID NO: 2602) |
| (Chothia) | |
| LCDR2 | RAS (SEQ ID NO: 2603) |
| (Chothia) | |
| LCDR3 | HGHSPT (SEQ ID NO: 2661) |
| (Chothia) | |
| LCDR1 | QDISNY (SEQ ID NO: 2605) |
| (IMGT) | |
| LCDR2 | RAS (SEQ ID NO: 2603) |
| (IMGT) | |
| LCDR3 | QQHGHSPTT (SEQ ID NO: 2660) |
| (IMGT) | |
| VL | DIQMTQSPSSLSASVGDRVTITCRASQDISNYLAWYQQKPGKAPKLLIYRASSL |
| | QSGVPSRFSGSGSGTDFTLTISSLQPEDFATYYCQQHGHSPTTFGQGTKVEIK |
| | (SEQ ID NO: 2662) |
| DNA VL | GATATCCAGATGACCCAGAGCCCGAGCAGCCTGAGCGCCAGCGTGGGCGA |
| | TCGCGTGACCATTACCTGCAGAGCCAGCCAGGACATTTCTAACTACCTGGC |
| | TTGGTACCAGCAGAAACCGGGCAAAGCGCCGAAACTATTAATCTACCGTG |
| | CTTCTTCTCTGCAAAGCGGCGTGCCGAGCCGCTTTAGCGGCAGCGGATCCG |
| | GCACCGATTTCACCCTGACCATTAGCTCTCTGCAACCGGAAGACTTTGCGA |
| | CCTATTATTGCCAGCAGCATGGTCATTCTCCGACTACCTTTGGCCAGGGCA |
| | CGAAAGTTGAAATTAAA (SEQ ID NO: 2663) |
| Light Chain | DIQMTQSPSSLSASVGDRVTITCRASQDISNYLAWYQQKPGKAPKLLIYRASSL |
| | QSGVPSRFSGSGSGTDFTLTISSLQPEDFATYYCQQHGHSPTTFGQGTKVEIKRT |
| | VAAPSVFIFPPSDEQLKSGTASVVCLLNNFYPREAKVQWKVDNALQSGNSQES |
| | VTEQDSKDSTYSLSSTLTLSKADYEKHKVYACEVTHQGLSSPVTKSFNRGEC |
| | (SEQ ID NO: 2664) |
| DNA Light | GATATCCAGATGACCCAGAGCCCGAGCAGCCTGAGCGCCAGCGTGGGCGA |
| Chain | TCGCGTGACCATTACCTGCAGAGCCAGCCAGGACATTTCTAACTACCTGGC |
| | TTGGTACCAGCAGAAACCGGGCAAAGCGCCGAAACTATTAATCTACCGTG |
| | CTTCTTCTCTGCAAAGCGGCGTGCCGAGCCGCTTTAGCGGCAGCGGATCCG |
| | GCACCGATTTCACCCTGACCATTAGCTCTCTGCAACCGGAAGACTTTGCGA |
| | CCTATTATTGCCAGCAGCATGGTCATTCTCCGACTACCTTTGGCCAGGGCA |
| | CGAAAGTTGAAATTAAACGTACGGTGGCCGCTCCCAGCGTGTTCATCTTCC |
| | CCCCCAGCGACGAGCAGCTGAAGAGCGGCACCGCCAGCGTGGTGTGCCTG |
| | CTGAACAACTTCTACCCCCGGGAGGCCAAGGTGCAGTGGAAGGTGGACAA |
| | CGCCCTGCAGAGCGGCAACAGCCAGGAAAGCGTCACCGAGCAGGACAGCA |
| | AGGACTCCACCTACAGCCTGAGCAGCACCCTGACCCTGAGCAAGGCCGAC |
| | TACGAGAAGCACAAGGTGTACGCCTGCGAGGTGACCCACCAGGGCCTGTC |
| | CAGCCCCGTGACCAAGAGCTTCAACCGGGGCGAGTGT (SEQ ID NO: 2665) |

MOR041877

| | |
|---|---|
| HCDR1 | GFSLSTSGVGVS (SEQ ID NO: 2666) |
| (Combined) | |
| HCDR2 | LIFSDHDKIYSTSLKT (SEQ ID NO: 2667) |
| (Combined) | |
| HCDR3 | TLIDRSVYFDY (SEQ ID NO: 2668) |
| (Combined) | |
| HCDR1 | TSGVGVS (SEQ ID NO: 2669) |
| (Kabat) | |
| HCDR2 | LIFSDHDKIYSTSLKT (SEQ ID NO: 2667) |
| (Kabat) | |
| HCDR3 | TLIDRSVYFDY (SEQ ID NO: 2668) |
| (Kabat) | |
| HCDR1 | GFSLSTSGV (SEQ ID NO: 2670) |
| (Chothia) | |
| HCDR2 | FSDHD (SEQ ID NO: 2671) |
| (Chothia) | |
| HCDR3 | TLIDRSVYFDY (SEQ ID NO: 2668) |
| (Chothia) | |
| HCDR1 | GFSLSTSGVG (SEQ ID NO: 2672) |
| (IMGT) | |
| HCDR2 | IFSDHDK (SEQ ID NO: 2673) |
| (IMGT) | |
| HCDR3 | ARTLIDRSVYFDY (SEQ ID NO: 2674) |
| (IMGT) | |
| VH | QVQLKESGPALVKPTQTLTLTCTF SGF SLSTSGVGVSWIRQPPGKALEWLALIF |
| | SDHDKIYSTSLKTRLTISKDTSKNQVVLTMTNMDPVDTATYYCARTLIDRSVY |
| | FDYWGQGTLVTVSS (SEQ ID NO: 2675) |
| DNA VH | CAGGTGCAATTGAAAGAAAGCGGTCCGGCGCTGGTGAAACCGACCCAGAC |
| | CCTGACCCTGACGTGCACCTTTTCCGGATTCAGCCTGTCTACTTCCGGTGTT |
| | GGTGTGAGCTGGATTCGCCAGCCGCCGGGCAAAGCGCTCGAGTGGCTGGC |
| | GCTGATCTTCTCTGACCATGACAAGATCTATAGCACCAGCCTGAAAACCCG |
| | TCTGACCATTAGCAAAGATACTTCGAAAAACCAGGTGGTGCTGACCATGAC |
| | CAACATGGACCCGGTGGATACCGCGACCTATTATTGCGCGCGTACTCTGAT |
| | CGACCGTTCTGTTTACTTCGATTACTGGGGCCAAGGCACCCTGGTGACTGTT |
| | AGCTCA (SEQ ID NO: 2676) |
| Heavy Chain | QVQLKESGPALVKPTQ TLTLTCTF SGF SLSTSGVGVSWIRQPPGKALEWLALIF |
| | SDHDKIYSTSLKTRLTISKDTSKNQVVLTMTNMDPVDTATYYCARTLIDRSVY |
| | FDYWGQGTLVTVSSASTKGPSVFPLAPSSKSTSGGTAALGCLVKDYFPEPVTV |
| | SWNSGALTSGVHTFPAVLQSSGLYSLSSVVTVPSSSLGTQTYICNVNHKPSNTK |
| | VDKRVEPKSCDKTHTCPPCPAPEAAGGPSVFLFPPKPKDTLMISRTPEVTCVVV |
| | DVSHEDPEVKFNWYVDGVEVHNAKTKPREEQYNSTYRVVSVLTVLHQDWLN |
| | GKEYKCKVSNKALPAPIEKTISKAKGQPREPQVYTLPPSREEMTKNQVSLTCL |
| | VKGFYPSDIAVEWESNGQPENNYKTTPPVLDSDGSFFLYSKLTVDKSRWQQG |
| | NVFSCSVMHEALHNHYTQKSLSLSPGK (SEQ ID NO: 2677) |
| DNA Heavy | CAGGTGCAATTGAAAGAAAGCGGTCCGGCGCTGGTGAAACCGACCCAGAC |
| Chain | CCTGACCCTGACGTGCACCTTTTCCGGATTCAGCCTGTCTACTTCCGGTGTT |
| | GGTGTGAGCTGGATTCGCCAGCCGCCGGGCAAAGCGCTCGAGTGGCTGGC |
| | GCTGATCTTCTCTGACCATGACAAGATCTATAGCACCAGCCTGAAAACCCG |
| | TCTGACCATTAGCAAAGATACTTCGAAAAACCAGGTGGTGCTGACCATGAC |
| | CAACATGGACCCGGTGGATACCGCGACCTATTATTGCGCGCGTACTCTGAT |
| | CGACCGTTCTGTTTACTTCGATTACTGGGGCCAAGGCACCCTGGTGACTGTT |
| | AGCTCAGCCTCCACCAAGGGTCCATCGGTCTTCCCCCTGGCACCCTCCTCC |
| | AAGAGCACCTCTGGGGGCACAGCGGCCCTGGGCTGCCTGGTCAAGGACTA |
| | CTTCCCCGAACCGGTGACGGTGTCGTGGAACTCAGGCGCCCTGACCAGCGG |
| | CGTGCACACCTTCCCGGCTGTCCTACAGTCCTCAGGACTCTACTCCCTCAGC |
| | AGCGTGGTGACCGTGCCCTCCAGCAGCTTGGGCACCCAGACCTACATCTGC |
| | AACGTGAATCACAAGCCCAGCAACACCAAGGTGGACAAGAGAGTTGAGCC |
| | CAAATCTTGTGACAAAACTCACACATGCCCACCGTGCCCAGCACCTGAAGC |
| | AGCGGGGGGACCGTCAGTCTTCCTCTTCCCCCCAAAACCCAAGGACACCCT |
| | CATGATCTCCCGGACCCCTGAGGTCACATGCGTGGTGGTGGACGTGAGCCA |
| | CGAAGACCCTGAGGTCAAGTTCAACTGGTACGTGGACGGCGTGGAGGTGC |
| | ATAATGCCAAGACAAAGCCGCGGGAGGAGCAGTACAACAGCACGTACCGG |
| | GTGGTCAGCGTCCTCACCGTCCTGCACCAGGACTGGCTGAATGGCAAGGA |
| | GTACAAGTGCAAGGTCTCCAACAAAGCCCTCCCAGCCCCCATCGAGAAAA |
| | CCATCTCCAAAGCCAAAGGGCAGCCCCGAGAACCACAGGTGTACACCCTG |
| | CCCCCATCCCGGGAGGAGATGACCAAGAACCAGGTCAGCCTGACCTGCCT |
| | GGTCAAAGGCTTCTATCCCAGCGACATCGCCGTGGAGTGGGAGAGCAATG |
| | GGCAGCCGGAGAACAACTACAAGACCACGCCTCCCGTGCTGGACTCCGAC |
| | GGCTCCTTCTTCCTCTACAGCAAGCTCACCGTGGACAAGAGCAGGTGGCAG |
| | CAGGGGAACGTCTTCTCATGCTCCGTGATGCATGAGGCTCTGCACAACCAC |
| | TACACGCAGAAGAGCCTCTCCCTGTCTCCGGGTAAA (SEQ ID NO: 2678) |
| LCDR1 | SGSSSNIGHHYVS (SEQ ID NO: 2679) |
| (Combined) | |
| LCDR2 | DNTNRPS (SEQ ID NO: 2680) |
| (Combined) | |
| LCDR3 | ATWDGLMNSIV (SEQ ID NO: 2681) |
| (Combined) | |
| LCDR1 | SGSSSNIGHHYVS (SEQ ID NO: 2679) |
| (Kabat) | |
| LCDR2 | DNTNRPS (SEQ ID NO: 2680) |
| (Kabat) | |
| LCDR3 | ATWDGLMNSIV (SEQ ID NO: 2681) |
| (Kabat) | |
| LCDR1 | SSSNIGHHY (SEQ ID NO: 2682) |
| (Chothia) | |
| LCDR2 | DNT (SEQ ID NO: 2683) |
| (Chothia) | |
| LCDR3 | WDGLMNSI (SEQ ID NO: 2684) |
| (Chothia) | |
| LCDR1 | SSNIGHHY (SEQ ID NO: 2685) |
| (IMGT) | |
| LCDR2 | DNT (SEQ ID NO: 2683) |
| (IMGT) | |
| LCDR3 | ATWDGLMNSIV (SEQ ID NO: 2681) |
| (IMGT) | |
| VL | DIVLTQPPSVSGAPGQRVTISCSGSSSNIGHHYVSWYQQLPGTAPKLLIYDNTN |
| | RPSGVPDRFSGSKSGTSASLAITGLQAEDEADYYCATWDGLMNSIVFGGGTKL |
| | TVL (SEQ ID NO: 2686) |
| DNA VL | GATATCGTGCTGACCCAGCCGCCGAGCGTGAGCGGTGCACCGGGCCAGCG |
| | CGTGACCATTAGCTGTAGCGGCAGCAGCAGCAACATTGGTCATCATTACGT |
| | GTCTTGGTACCAGCAGCTGCCGGGCACGGCGCCGAAACTGCTGATCTACGA |
| | CAACACTAACCGCCCGAGCGGCGTGCCGGATCGCTTTAGCGGATCCAAAA |
| | GCGGCACCAGCGCCAGCCTGGCGATTACCGGCCTGCAAGCAGAAGACGAA |
| | GCGGATTATTACTGCGCTACTTGGGACGGTCTGATGAACTCTATCGTGTTTG |
| | GCGGCGGCACGAAGTTAACCGTCCTA (SEQ ID NO: 2687) |
| Light Chain | DIVLTQPPSVSGAPGQRVTISCSGSSSNIGHHYVSWYQQLPGTAPKLLIYDNTN |
| | RPSGVPDRFSGSKSGTSASLAITGLQAEDEADYYCATWDGLMNSIVFGGGTKL |
| | TVLGQPKAAPSVTLFPPSSEELQANKATLVCLISDFYPGAVTVAWKADSSPVK |
| | AGVETTTPSKQSNNKYAASSYLSLTPEQWKSHRSYSCQVTHEGSTVEKTVAPT |
| | ECS (SEQ ID NO: 2688) |
| DNA Light | GATATCGTGCTGACCCAGCCGCCGAGCGTGAGCGGTGCACCGGGCCAGCG |
| Chain | CGTGACCATTAGCTGTAGCGGCAGCAGCAGCAACATTGGTCATCATTACGT |
| | GTCTTGGTACCAGCAGCTGCCGGGCACGGCGCCGAAACTGCTGATCTACGA |
| | CAACACTAACCGCCCGAGCGGCGTGCCGGATCGCTTTAGCGGATCCAAAA |
| | GCGGCACCAGCGCCAGCCTGGCGATTACCGGCCTGCAAGCAGAAGACGAA |
| | GCGGATTATTACTGCGCTACTTGGGACGGTCTGATGAACTCTATCGTGTTTG |
| | GCGGCGGCACGAAGTTAACCGTCCTAGGTCAGCCCAAGGCTGCCCCCTCG |
| | GTCACTCTGTTCCCGCCCTCCTCTGAGGAGCTTCAAGCCAACAAGGCCACA |
| | CTGGTGTGTCTCATAAGTGACTTCTACCCGGGAGCCGTGACAGTGGCCTGG |
| | AAGGCAGATAGCAGCCCCGTCAAGGCGGGAGTGGAGACCACCACACCCTC |
| | CAAACAAAGCAACAACAAGTACGCGGCCAGCAGCTATCTGAGCCTGACGC |
| | CTGAGCAGTGGAAGTCCCACAGAAGCTACAGCTGCCAGGTCACGCATGAA |
| | GGGAGCACCGTGGAGAAGACAGTGGCCCCTACAGAATGTTCA |
| | (SEQ ID NO: 2689) |

[0547] In some embodiments, each of the light chain variable regions and each of the heavy chain variable regions disclosed above, including those in TABLE J1 above, may be attached to the light chain constant regions (TABLE EN1) and heavy chain constant regions (TABLE EN2) to form complete antibody light and heavy chains, respectively, as further discussed below. Further, each of the generated heavy and light chain sequences may be combined to form a complete antibody structure. It should be understood that the heavy chain and light chain variable regions provided herein can also be attached to other constant domains having different sequences than the exemplary sequences listed herein.

[0548] K. KR Patent Application Publication No. KR20200048069A

[0549] In some embodiments, the TREM2 agonist is an antibody, or an antigen-binding fragment thereof, as described in KR Patent Application Publication No. KR20200048069A, which is incorporated by reference herein, in its entirety.

[0550] In some embodiments, the TREM2 antibody comprises the CDR LL CDR L2 and CDR L3 in the light chain variable region of the antibody produced by hybridoma cells with accession number KCTC 13471BP or hybridoma cells with accession number KTC 13470BP.

[0551] In some embodiments, the TREM2 antibody comprises the CDR HL CDR H2 and CDR H3 in the heavy chain variable region of the antibody produced by hybridoma cells with accession number KCTC 13471BP or hybridoma cells with accession number KTC 13470BP.

[0552] In some embodiments, the TREM2 antibody comprises the CDR LL CDR L2 and CDR L3 in the light chain variable region and the CDR HL CDR H2 and CDR H3 in the heavy chain variable region of the antibody produced by hybridoma cells with accession number KCTC 13471BP or hybridoma cells with accession number KTC 13470BP.

[0553] In some embodiments, the TREM2 antibody comprises the light chain variable region and the heavy chain variable region of the antibody produced by hybridoma cells with accession number KCTC 13471BP or hybridoma cells with accession number KTC 13470BP.

[0554] In some embodiments, the TREM2 agonist is an antibody produced by hybridoma cells with accession number KCTC 13471BP or hybridoma cells with accession number KTC 13470BP.

[0555] In some embodiments, the light chain variable regions and the heavy chain variable regions describe above for the antibody produced by hybridoma cells with accession number KCTC 13471BP or hybridoma cells with accession number KTC 13470BP may be attached to the light chain constant regions (TABLE EN1) and heavy chain constant regions (TABLE EN2) to form complete antibody light and heavy chains, respectively, as further discussed below. Further, each of the generated heavy and light chain sequences may be combined to form a complete antibody structure. It should be understood that the heavy chain and light chain variable regions provided herein can also be attached to other constant domains having different sequences than the exemplary sequences listed herein.

[0556] L. PCT Patent Application Publication No. WO2020/172450A1

[0557] In some embodiments, the TREM2 agonist is an antibody, or an antigen-binding fragment thereof, as described in PCT Patent Application Publication No. WO2020/172450A1 (“the '450 application”), which is incorporated by reference herein, in its entirety.

[0558] In some embodiments, the antibody or antigen-binding fragment thereof comprises:

(a) a CDR-H1 sequence comprising the sequence of GFSIEDFYIH (SEQ ID NO:2717);
(b) a CDR-H2 sequence comprising the sequence of W-I-D-P-E-β₆-G-β₈-S-K-Y-A-P-K-F-Q-G (SEQ ID NO:2735), wherein β₆ is N or Q and β₈ is D or E;
(c) a CDR-H3 sequence comprising the sequence of HADHGNYGSTMDY (SEQ ID NO:2719);
(d) CDR-L1 sequence comprising the sequence of HASQHINVWLS (SEQ ID NO:2720);
(e) a CDR-L2 sequence comprising the sequence of KASNLHT (SEQ ID NO:2721); and
(f) a CDR-L3 sequence comprising the sequence of QQGQTYPRT (SEQ ID NO: 2722).

[0559] In some embodiments, the CDR-H2 sequence is selected from SEQ ID NOS:2718, 2727, 2729, and 2731.

[0560] In some embodiments, the antibody or antigen-binding fragment comprises:

(a) a CDR-H1 comprising the amino acid sequence of SEQ ID NO:2717, a CDR-H2 comprising the amino acid sequence of SEQ ID NO:2718, a CDR-H3 comprising the amino acid sequence of SEQ ID NO:2719, a CDR-L1 comprising the amino acid sequence of SEQ ID NO:2720, a CDR-L2 comprising the amino acid sequence of SEQ ID NO:2721, and a CDR-L3 comprising the amino acid sequence of SEQ ID NO:2722; or
(b) a CDR-H1 comprising the amino acid sequence of SEQ ID NO:2717, a CDR-H2 comprising the amino acid sequence of SEQ ID NO:2727, a CDR-H3 comprising the amino acid sequence of SEQ ID NO:2719, a CDR-L1 comprising the amino acid sequence of SEQ ID NO:2720, a CDR-L2 comprising the amino acid sequence of SEQ ID NO:2721, and a CDR-L3 comprising the amino acid sequence of SEQ ID NO:2722; or
(c) a CDR-H1 comprising the amino acid sequence of SEQ ID NO:2717, a CDR-H2 comprising the amino acid sequence of SEQ ID NO:2729, a CDR-H3 comprising the amino acid sequence of SEQ ID NO:2719, a CDR-L1 comprising the amino acid sequence of SEQ ID NO:2720, a CDR-L2 comprising the amino acid sequence of SEQ ID NO:2721, and a CDR-L3 comprising the amino acid sequence of SEQ ID NO:2722; or
(d) a CDR-H1 comprising the amino acid sequence of SEQ ID NO:2717, a CDR-H2 comprising the amino acid sequence of SEQ ID NO:2731, a CDR-H3 comprising the amino acid sequence of SEQ ID NO:2719, a CDR-L1 comprising the amino acid sequence of SEQ ID NO:2720, a CDR-L2 comprising the amino acid sequence of SEQ ID NO:2721, and a CDR-L3 comprising the amino acid sequence of SEQ ID NO:2722.

[0561] In some embodiments, the antibody or antigen-binding fragment comprises a V H sequence that has at least 85% sequence identity to any one of SEQ ID NOS:2715, 2723, 2725, 2726, 2728, 2730, 2732, 2733, and 2734. In some embodiments, the V H sequence has at least 90% sequence identity to SEQ ID NO:2715. In some embodiments, the V_{H} sequence has at least 95% sequence identity to SEQ ID NO:2715. In some embodiments, the V_{H} sequence comprises SEQ ID NO:2715. In some embodiments, the V_{H} sequence has at least 90% sequence identity to SEQ ID NO:2730. In some embodiments, the V_{H} sequence has at least 95% sequence identity to SEQ ID NO:2730. In some embodiments, the V_{H} sequence comprises SEQ ID NO:2730. In some embodiments, the V_{H} sequence has at least 90% sequence identity to SEQ ID NO:2733. In some embodiments, the V_{H} sequence has at least 95% sequence identity to SEQ ID NO:2733. In some embodiments, the V_{H} sequence comprises SEQ ID NO:2733.

[0562] In some embodiments, the antibody or antigen-binding fragment comprises a V_{L} sequence that has at least 85% sequence identity to SEQ ID NO:2716 or SEQ ID NO:2724. In some embodiments, the V_{L} sequence has at least 90% sequence identity to SEQ ID NO:2716. In some embodiments, the V_{L} sequence has at least 95% sequence identity to SEQ ID NO:2716. In some embodiments, the V_{L} sequence comprises SEQ ID NO:2716. In some embodiments, the V_{L} sequence has at least 90% sequence identity to SEQ ID NO:2724. In some embodiments, the V_{L} sequence has at least 95% sequence identity to SEQ ID NO:2724. In some embodiments, the V_{L} sequence comprises SEQ ID NO:2724.

[0563] In some embodiments, the antibody or antigen-binding fragment comprises:

(a) a VH sequence comprising SEQ ID NO:2715 and a V_{L} sequence comprising SEQ ID NO:2716; or
(b) a VH sequence comprising SEQ ID NO:2723 and a V_{L} sequence comprising SEQ ID NO:2724; or
(c) a VH sequence comprising SEQ ID NO:2725 and a V_{L} sequence comprising SEQ ID NO:2724; or
(d) a VH sequence comprising SEQ ID NO:2726 and a V_{L} sequence comprising SEQ ID NO:2724; or
(e) a VH sequence comprising SEQ ID NO:2728 and a V_{L} sequence comprising SEQ ID NO:2724; or
(f) a VH sequence comprising SEQ ID NO:2730 and a V_{L} sequence comprising SEQ ID NO:2724; or
(g) a VH sequence comprising SEQ ID NO:2732 and a V_{L} sequence comprising SEQ ID NO:2724; or
(h) a VH sequence comprising SEQ ID NO:2733 and a VL sequence comprising SEQ ID NO:2724; or
(i) a VH sequence comprising SEQ ID NO:2734 and a VL sequence comprising SEQ ID NO:2724.

[0564] In some embodiments, an antibody or antigen-binding fragment thereof that specifically binds to TREM2 comprises:

(a) a CDR-H1 sequence comprising the sequence of G-F-T-F-T-α₆-F-Y-M-S (SEQ ID NO:2736), wherein α₆ is D or N;
(b) a CDR-H2 sequence comprising the sequence of V-I-R-N-β₅-β₆-N-β₈-Y-T-β₁₁-β₁₂-Y-N-P-S-V-K-G (SEQ ID NO:2737), wherein β₅ is K or R; β₆ is A or P; β₈ is G or A; β₁₁ is A or T; and β₁₂ is G or D;
(c) a CDR-H3 sequence comprising the sequence of γ₁-R-L-γ₄-Y-G-F-D-Y (SEQ ID NO:2738), wherein γ₁ is A or T; and γ₄ is T or S;
(d) a CDR-L1 sequence comprising the sequence of Q-S-S-K-S-L-L-H-S-βιo-G-K-T-Y-L-N (SEQ ID NO:2739), wherein διo is N or T;
a CDR-L2 sequence comprising the sequence of WMSTRAS (SEQ ID NO: 2696); and
(e) a CDR-L3 sequence comprising the sequence of Q-Q-F-L-Eϕ₆-P-F-T (SEQ ID NO:2740), wherein ϕ₆ is Y or F.

[0565] In some embodiments, the CDR-H1 sequence is selected from any one of SEQ ID NOS:2692 and 2700. In some embodiments, the CDR-H2 sequence is selected from any one of SEQ ID NOS:2693, 2701, and 2713. In some embodiments, the CDR-H3 sequence is selected from any one of SEQ ID NOS:2694, 2702, and 2705. In some embodiments, the CDR-L1 sequence is selected from any one of SEQ ID NOS:2695 and 2711. In some embodiments, the CDR-L3 sequence is selected from any one of SEQ ID NOS:2697 and 2706.

[0566] In some embodiments, the antibody or antigen-binding fragment comprises:

(a) a CDR-H1 comprising the amino acid sequence of SEQ ID NO:2692, a CDR-H2 comprising the amino acid sequence of SEQ ID NO:2693, a CDR-H3 comprising the amino acid sequence of SEQ ID NO:2705, a CDR-L1 comprising the amino acid sequence of SEQ ID NO:2695, a CDR-L2 comprising the amino acid sequence of SEQ ID NO:2696, and a CDR-L3 comprising the amino acid sequence of SEQ ID NO:2706; or
(b) a CDR-H1 comprising the amino acid sequence of SEQ ID NO:2692, a CDR-H2 comprising the amino acid sequence of SEQ ID NO:2693, a CDR-H3 comprising the amino acid sequence of SEQ ID NO:2705, a CDR-L1 comprising the amino acid sequence of SEQ ID NO:2711, a CDR-L2 comprising the amino acid sequence of SEQ ID NO:2696, and a CDR-L3 comprising the amino acid sequence of SEQ ID NO:2706; or
(c) a CDR-H1 comprising the amino acid sequence of SEQ ID NO:2692, a CDR-H2 comprising the amino acid sequence of SEQ ID NO:2713, a CDR-H3 comprising the amino acid sequence of SEQ ID NO:2705, a CDR-L1 comprising the amino acid sequence of SEQ ID NO:2695, a CDR-L2 comprising the amino acid sequence of SEQ ID NO:2696, and a CDR-L3 comprising the amino acid sequence of SEQ ID NO:2706; or
(d) a CDR-H1 comprising the amino acid sequence of SEQ ID NO:2692, a CDR-H2 comprising the amino acid sequence of SEQ ID NO:2713, a CDR-H3 comprising the amino acid sequence of SEQ ID NO:2705, a CDR-L1 comprising the amino acid sequence of SEQ ID NO:2711, a CDR-L2 comprising the amino acid sequence of SEQ ID NO:2696, and a CDR-L3 comprising the amino acid sequence of SEQ ID NO:2706; or
(e) a CDR-H1 comprising the amino acid sequence of SEQ ID NO:2692, a CDR-H2 comprising the amino acid sequence of SEQ ID NO:2693, a CDR-H3 comprising the amino acid sequence of SEQ ID NO:2694, a CDR-L1 comprising the amino acid sequence of SEQ ID NO:2695, a CDR-L2 comprising the amino acid sequence of SEQ ID NO:2696, and a CDR-L3 comprising the amino acid sequence of SEQ ID NO:2697; or
(f) a CDR-H1 comprising the amino acid sequence of SEQ ID NO:2700, a CDR-H2 comprising the amino acid sequence of SEQ ID NO:2701, a CDR-H3 comprising the amino acid sequence of SEQ ID NO:2702, a CDR-L1 comprising the amino acid sequence of SEQ ID NO:2695, a CDR-L2 comprising the amino acid sequence of SEQ ID NO:2696, and a CDR-L3 comprising the amino acid sequence of SEQ ID NO:2697; or
(g) a CDR-H1 comprising the amino acid sequence of SEQ ID NO:2692, a CDR-H2 comprising the amino acid sequence of SEQ ID NO:2713, a CDR-H3 comprising the amino acid sequence of SEQ ID NO:2705, a CDR-L1 comprising the amino acid sequence of SEQ ID NO:2695, a CDR-L2 comprising the amino acid sequence of SEQ ID NO:2696, and a CDR-L3 comprising the amino acid sequence of SEQ ID NO:2697.

[0567] In some embodiments, the antibody or antigen-binding fragment comprises a VH sequence that has at least 85% sequence identity to any one of SEQ ID NOS:2690, 2698, 2703, 2708, 2709, 2712, 2714, and 2752. In some embodiments, the VH sequence has at least 90% sequence identity to SEQ ID NO:2703. In some embodiments, the VH sequence has at least 95% sequence identity to SEQ ID NO:2703. In some embodiments, the VH sequence comprises SEQ ID NO:2703. In some embodiments, the VH sequence has at least 90% sequence identity to SEQ ID NO:2712. In some embodiments, the VH sequence has at least 95% sequence identity to SEQ ID NO:2712. In some embodiments, the VH sequence comprises SEQ ID NO:2712. In some embodiments, the VH sequence has at least 90% sequence identity to SEQ ID NO:79. In some embodiments, the VH sequence has at least 95% sequence identity to SEQ ID NO:79. In some embodiments, the VH sequence comprises SEQ ID NO:79.

[0568] In some embodiments, the antibody or antigen-binding fragment comprises a VL sequence that has at least 85% sequence identity to any one of SEQ ID NOS:2691, 2699, 2704, 2708, 2710, and 2741. In some embodiments, the VL sequence has at least 90% sequence identity to SEQ ID NO:2704. In some embodiments, the VL sequence has at least 95% sequence identity to SEQ ID NO:2704. In some embodiments, the VL sequence comprises SEQ ID NO:2704. In some embodiments, the VL sequence has at least 90% sequence identity to SEQ ID NO:2710. In some embodiments, the VL sequence has at least 95% sequence identity to SEQ ID NO:2710. In some embodiments, the VL sequence comprises SEQ ID NO:2710. In some embodiments, the VL sequence has at least 90% sequence identity to SEQ ID NO:2741. In some embodiments, the VL sequence has at least 95% sequence identity to SEQ ID NO:2741. In some embodiments, the VL sequence comprises SEQ ID NO:2741.

[0569] In some embodiments, the antibody or antigen-binding fragment comprises:

(a) a VH sequence comprising SEQ ID NO:2703 and a VL sequence comprising SEQ ID NO:2704; or
(b) a VH sequence comprising SEQ ID NO:2707 and a VL sequence comprising SEQ ID NO:2708; or
(c) a VH sequence comprising SEQ ID NO:2709 and a VL sequence comprising SEQ ID NO:2708; or
(d) a VH sequence comprising SEQ ID NO:2707 and a VL sequence comprising SEQ ID NO:2710; or
(e) a VH sequence comprising SEQ ID NO:79 and a VL sequence comprising SEQ ID NO:2710; or
(f) a VH sequence comprising SEQ ID NO:2712 and a VL sequence comprising SEQ ID NO:2708; or
(g) a VH sequence comprising SEQ ID NO:2714 and a VL sequence comprising SEQ ID NO:2708; or
(h) a VH sequence comprising SEQ ID NO:2712 and a VL sequence comprising SEQ ID NO:2710; or
(i) a VH sequence comprising SEQ ID NO:2714 and a VL sequence comprising SEQ ID NO:2710; or
(j) a VH sequence comprising SEQ ID NO:2690 and a VL sequence comprising SEQ ID NO:2691; or
(k) a VH sequence comprising SEQ ID NO:2698 and a VL sequence comprising SEQ ID NO:2699; or
(l) a VH sequence comprising SEQ ID NO:2712 and a VL sequence comprising SEQ ID NO:2741.

[0570] In some embodiments, an antibody or antigen-binding fragment thereof that specifically binds to TREM2 comprises:

(a) a CDR-H1 sequence comprising the amino acid sequence of any one of SEQ ID NOS:2692, 2700, and 2717;
(b) a CDR-H2 sequence comprising the amino acid sequence of any one of

### SEQ ID NOS:2693, 2701, 2713, 2718, 2727, 2729, and 2731;

[0571] (c) a CDR-H3 sequence comprising the amino acid sequence of any one of SEQ ID NOS:2694, 2702, 2705, and 2719;
(d) a CDR-L1 sequence comprising the amino acid sequence of any one of SEQ ID NOS:2695, 2711, and 2720;
(e) a CDR-L2 sequence comprising the amino acid sequence of any one of SEQ ID NOS:2696 and 2721; and
(f) a CDR-L3 sequence comprising the amino acid sequence of any one of SEQ ID NOS:2697, 2706, and 2722.

[0572] In some embodiments, the antibody or antigen-binding fragment comprises:

(a) a CDR-H1 comprising the amino acid sequence of SEQ ID NO:2692, a CDR-H2 comprising the amino acid sequence of SEQ ID NO:2693, a CDR-H3 comprising the amino acid sequence of SEQ ID NO:2694, a CDR-L1 comprising the amino acid sequence of SEQ ID NO:2695, a CDR-L2 comprising the amino acid sequence of SEQ ID NO:2696, and a CDR-L3 comprising the amino acid sequence of SEQ ID NO:2697; or
(b) a CDR-H1 comprising the amino acid sequence of SEQ ID NO:2692, a CDR-H2 comprising the amino acid sequence of SEQ ID NO:2693, a CDR-H3 comprising the amino acid sequence of SEQ ID NO:2705, a CDR-L1 comprising the amino acid sequence of SEQ ID NO:2695, a CDR-L2 comprising the amino acid sequence of SEQ ID NO:2696, and a CDR-L3 comprising the amino acid sequence of SEQ ID NO:2706; or
(c) a CDR-H1 comprising the amino acid sequence of SEQ ID NO:2692, a CDR-H2 comprising the amino acid sequence of SEQ ID NO:2693, a CDR-H3 comprising the amino acid sequence of SEQ ID NO:2705, a CDR-L1 comprising the amino acid sequence of SEQ ID NO:2711, a CDR-L2 comprising the amino acid sequence of SEQ ID NO:2696, and a CDR-L3 comprising the amino acid sequence of SEQ ID NO:2706; or
(d) a CDR-H1 comprising the amino acid sequence of SEQ ID NO:2692, a CDR-H2 comprising the amino acid sequence of SEQ ID NO:2713, a CDR-H3 comprising the amino acid sequence of SEQ ID NO:2705, a CDR-L1 comprising the amino acid sequence of SEQ ID NO:2695, a CDR-L2 comprising the amino acid sequence of SEQ ID NO:2696, and a CDR-L3 comprising the amino acid sequence of SEQ ID NO:2706; or
(e) a CDR-H1 comprising the amino acid sequence of SEQ ID NO:2692, a CDR-H2 comprising the amino acid sequence of SEQ ID NO:2713, a CDR-H3 comprising the amino acid sequence of SEQ ID NO:2705, a CDR-L1 comprising the amino acid sequence of SEQ ID NO:2711, a CDR-L2 comprising the amino acid sequence of SEQ ID NO:2696, and a CDR-L3 comprising the amino acid sequence of SEQ ID NO:2706; or
(f) a CDR-H1 comprising the amino acid sequence of SEQ ID NO:2700, a CDR-H2 comprising the amino acid sequence of SEQ ID NO:2701, a CDR-H3 comprising the amino acid sequence of SEQ ID NO:2702, a CDR-L1 comprising the amino acid sequence of SEQ ID NO:2695, a CDR-L2 comprising the amino acid sequence of SEQ ID NO:2696, and a CDR-L3 comprising the amino acid sequence of SEQ ID NO:2697;
(g) a CDR-H1 comprising the amino acid sequence of SEQ ID NO:2717, a CDR-H2 comprising the amino acid sequence of SEQ ID NO:2718, a CDR-H3 comprising the amino acid sequence of SEQ ID NO:2719, a CDR-L1 comprising the amino acid sequence of SEQ ID NO:2720, a CDR-L2 comprising the amino acid sequence of SEQ ID NO:2721, and a CDR-L3 comprising the amino acid sequence of SEQ ID NO:2722; or
(h) a CDR-H1 comprising the amino acid sequence of SEQ ID NO:2717, a CDR-H2 comprising the amino acid sequence of SEQ ID NO:2727, a CDR-H3 comprising the amino acid sequence of SEQ ID NO:2719, a CDR-L1 comprising the amino acid sequence of SEQ ID NO:2720, a CDR-L2 comprising the amino acid sequence of SEQ ID NO:2721, and a CDR-L3 comprising the amino acid sequence of SEQ ID NO:2722; or
(i) a CDR-H1 comprising the amino acid sequence of SEQ ID NO:2717, a CDR-H2 comprising the amino acid sequence of SEQ ID NO:2729, a CDR-H3 comprising the amino acid sequence of SEQ ID NO:2719, a CDR-L1 comprising the amino acid sequence of SEQ ID NO:2720, a CDR-L2 comprising the amino acid sequence of SEQ ID NO:2721, and a CDR-L3 comprising the amino acid sequence of SEQ ID NO:2722; or
(j) a CDR-H1 comprising the amino acid sequence of SEQ ID NO:2717, a CDR-H2 comprising the amino acid sequence of SEQ ID NO:2731, a CDR-H3 comprising the amino acid sequence of SEQ ID NO:2719, a CDR-L1 comprising the amino acid sequence of SEQ ID NO:2720, a CDR-L2 comprising the amino acid sequence of SEQ ID NO:2721, and a CDR-L3 comprising the amino acid sequence of SEQ ID NO:2722; or
(k) a CDR-H1 comprising the amino acid sequence of SEQ ID NO:2692, a CDR-H2 comprising the amino acid sequence of SEQ ID NO:2713, a CDR-H3 comprising the amino acid sequence of SEQ ID NO:2705, a CDR-L1 comprising the amino acid sequence of SEQ ID NO:2695, a CDR-L2 comprising the amino acid sequence of SEQ ID NO:2696, and a CDR-L3 comprising the amino acid sequence of SEQ ID NO:2697.

[0573] In some embodiments, the antibody or antigen-binding fragment comprises:

(a) a VH sequence that has at least 85% sequence identity to SEQ ID NO:2690 and a VL sequence that has at least 85% sequence identity to SEQ ID NO:2691; or
(b) a VH sequence that has at least 85% sequence identity to SEQ ID NO: 2698 and a VL sequence that has at least 85% sequence identity to SEQ ID NO:2699; or
(c) a VH sequence that has at least 85% sequence identity to SEQ ID NO:2703 and a VL sequence that has at least 85% sequence identity to SEQ ID NO:2704; or
(d) a VH sequence that has at least 85% sequence identity to SEQ ID NO:2707 and a VL sequence that has at least 85% sequence identity to SEQ ID NO:2708; or
a VH sequence that has at least 85% sequence identity to SEQ ID NO:2709 and a VL sequence that has at least 85% sequence identity to SEQ ID NO:2708; or
(f) a VH sequence that has at least 85% sequence identity to SEQ ID NO: 2707 and a VL sequence that has at least 85% sequence identity to SEQ ID NO:2710; or
(g) a VH sequence that has at least 85% sequence identity to SEQ ID NO:79 and a VL sequence that has at least 85% sequence identity to SEQ ID NO:2710; or
(h) a VH sequence that has at least 85% sequence identity to SEQ ID NO:2712 and a VL sequence that has at least 85% sequence identity to SEQ ID NO:2708; or
(i) a VH sequence that has at least 85% sequence identity to SEQ ID NO:2714 and a VL sequence that has at least 85% sequence identity to SEQ ID NO:2708; or
(j) a VH sequence that has at least 85% sequence identity to SEQ ID NO:2712 and a VL sequence that has at least 85% sequence identity to SEQ ID NO:2710; or
(k) a VH sequence that has at least 85% sequence identity to SEQ ID NO: 2714 and a VL sequence that has at least 85% sequence identity to SEQ ID NO:2710; or
(l) a VH sequence that has at least 85% sequence identity to SEQ ID NO: 2715 and a VL sequence that has at least 85% sequence identity to SEQ ID NO:2716; or
(m) a VH sequence that has at least 85% sequence identity to SEQ ID NO:2723 and a VL sequence that has at least 85% sequence identity to SEQ ID NO:2724; or
(n) a VH sequence that has at least 85% sequence identity to SEQ ID NO: 2725 and a VL sequence that has at least 85% sequence identity to SEQ ID NO:2724; or
(o) a VH sequence that has at least 85% sequence identity to SEQ ID NO: 2726 and a VL sequence that has at least 85% sequence identity to SEQ ID NO:2724; or
(p) a VH sequence that has at least 85% sequence identity to SEQ ID NO:2728 and a VL sequence that has at least 85% sequence identity to SEQ ID NO:2724; or
(q) a VH sequence that has at least 85% sequence identity to SEQ ID NO:2730 and a VL sequence that has at least 85% sequence identity to SEQ ID NO:2724; or
(r) a VH sequence that has at least 85% sequence identity to SEQ ID NO: 2732 and a VL sequence that has at least 85% sequence identity to SEQ ID NO:2724; or
(s) a VH sequence that has at least 85% sequence identity to SEQ ID NO: 2733 and a VL sequence that has at least 85% sequence identity to SEQ ID NO:2724; or
(t) a VH sequence that has at least 85% sequence identity to SEQ ID NO: 2734 and a VL sequence that has at least 85% sequence identity to SEQ ID NO:2724; or
(u) a VH sequence that has at least 85% sequence identity to SEQ ID NO:2712 and a VL sequence that has at least 85% sequence identity to SEQ ID NO:2741.

[0574] In some embodiments, an antibody or antigen-binding fragment thereof that specifically binds to TREM2 recognizes an epitope that is the same or substantially the same as the epitope recognized by antibody clone selected from the group consisting of: CL0020306, Clone CL0020188, Clone CL0020188-1, Clone CL0020188-2, Clone CL0020188-3, Clone CL0020188-4, Clone CL0020188-5, Clone CL0020188-6, Clone CL0020 188-7, Clone CL0020188-8, Clone CL0020307, Clone CL0020123, Clone CL0020 123-1, Clone CL0020123-2, Clone CL0020123-3, Clone CL0020123-4, Clone CL0020123-5, Clone CL0020123-6, Clone CL0020123-7, and Clone CL0020123-8.

[0575] In some embodiments, the antibody or antigen-binding fragment recognizes an epitope that is the same or substantially the same as the epitope recognized by an antibody clone selected from the group consisting of: Clone CL0020123, Clone CL0020123-1, Clone CL0020123-2, Clone CL0020123-3, Clone CL0020123-4, Clone CL0020123-5, Clone CL0020123-6, Clone CL0020123-7, and Clone CL0020123-8. In particular embodiments, the antibody or antigen-binding fragment recognizes one or more of the following epitopes in SEQ ID NO:1: (i) amino acid residues 55-63 (GEKGPCQRV (SEQ ID NO:2743)), (ii) amino acids 96-107 (TLRNLQPHDAGL (SEQ ID NO:2744)), and (iii) amino acid residues 126-129 (VEVL (SEQ ID NO:2745)). In another aspect, the disclosure features an isolated antibody or antigen-binding fragment thereof that specifically binds to a human TREM2, wherein the antibody or antigen-binding fragment thereof recognizes an epitope comprising or consisting of one or more of the following epitopes in SEQ ID NO:1: (i) amino acid residues 55-63 (GEKGPCQRV (SEQ ID NO:2743)), (ii) amino acids 96-107 (TLRNLQPHDAGL (SEQ ID NO:2744)), and (iii) amino acid residues 126-129 (VEVL (SEQ ID NO:2745)). In some embodiments, the antibody or antigen-binding fragment recognizes an epitope that is the same or substantially the same as the epitope recognized by an antibody clone selected from the group consisting of: Clone CL0020188, Clone CL0020188-1, Clone CL0020188-2, Clone CL0020188-3, Clone CL0020188-4, Clone CL0020188-5, Clone CL0020188-6, Clone CL0020 188-7, Clone CL0020188-8, Clone CL0020307, and Clone CL0020306. In particular embodiments, the antibody or antigen-binding fragment recognizes amino acid residues 143149 (FPGESES (SEQ ID NO:2742)) in SEQ ID NO:1. In another aspect, the disclosure features an isolated antibody or antigen-binding fragment thereof that specifically binds to a human TREM2, wherein the antibody or antigen-binding fragment thereof recognizes an epitope comprising or consisting of amino acid residues 143-149 (FPGESES (SEQ ID NO:2742)) in SEQ ID NO:1.

[0576] In some embodiments, an antibody or antigen-binding fragment as disclosed herein decreases levels of soluble TREM2 protein (sTREM2). In some embodiments, an antibody or antigen-binding fragment as disclosed herein binds soluble TREM2 protein (sTREM2) in healthy human CSF or cynomolgus CSF with better potency compared to a reference antibody. In some embodiments, the reference antibody is represented by a combination of sequences selected from the group consisting of: SEQ ID NOS:2746 and 2747; SEQ ID NOS:2748 and 2749; and SEQ ID NOS:2750 and 2751.

[0577] In some embodiments, the antibody is an antibody having a VL, VH, full heavy chain sequence, full light chain sequence, a CDR sequence, or a full sequence disclosed in the “Informal Sequence Listing” Table IX of PCT Patent Application Publication No. WO 2020/172450 A1, which are reproduced below as TABLE L1.

TABLE L1

| Description | Sequence |
|---|---|
| Human TREM2 Protein | MEPLRLLILLFVTELSGAHNTTVFQGVAGQSLQVS |
| | CPYDSMKHWGRRKAWCRQLGEKGPCQRVVSTH |
| | NLWLLSFLRRWNGSTAITDDTLGGTLTITLRNLQP |
| | HDAGLYQCQSLHGSEADTLRKVLVEVLADPLDH |
| | RDAGDLWFPGESESFEDAHVEHSISRSLLEGEIPFP |
| | PTSILLLLACIFLIKILAASALWAAAWHGQKPGTH |
| | PPSELDCGHDPGYQLQTLPGLRDT (SEQ ID NO: 1) |
| CL0020306 VH | EVKLLDSGGGLVQAGGSLRLSCAGSGFTFTDFYM |
| | SWIRQPPGKAPEWLGVIRNKANGYTAGYNPSVK |
| | GRFTISRDNTQNILYLQMNTL |
| | RAEDTAIYYCARLSYGFDYWGQGVMVTVSS |
| | (SEQ ID NO: 2690) |
| CL0020306 VL | DIVMTQGALPNPVPSGESASITCQSSKSLLHSNGK |
| | TYLNWYLQRPGQSPQLLIYWMSTRASGVSDRFSG |
| | SGSGTDFTLKISSVEAEDVG |
| | VYYCQQFLEFPFTFGSGTKLEIK (SEQ ID NO :2691) |
| CL0020306 CDR-H1; CDR-H1 for | GFTFTDFYMS (SEQ ID NO: 2692) |
| CL0020188 and variants CL0020188-1, | |
| CL0020188-2, CL0020188-3, CL0020188-4, | |
| CL0020188-5, CL0020188-6, | |
| CL0020188-7, and CL0020188-8 | |
| CL0020306 CDR-H2; CDR-H2 for | VIRNKANGYTAGYNPSVKG (SEQ ID NO: 2693) |
| CL0020188 and variants CL0020188-1, | |
| CL0020188-2, CL0020188-3, and | |
| CL0020188-4 | |
| CL0020306 CDR-H3 | ARLSYGFDY (SEQ ID NO: 2694) |
| CL0020306 CDR-L1; CL0020307 CDR- | QSSKSLLHSNGKTYLN (SEQ ID NO: 2695) |
| L1; CL0020307-1 CDR-L1; CDR-L1 for | |
| CL0020188 and variants CL0020188-1, | |
| CL0020188-2, CL0020188-5, and | |
| CL0020188-6 | |
| CL0020306 CDR-L2; CL0020307 CDR-L2; | WMSTRAS (SEQ ID NO: 2696) |
| CL0020307-1 CDR-L2; CDR-L2 for | |
| CL0020188 and variants CL0020188-1, | |
| CL0020188-2, CL0020188-3, CL0020188-4, | |
| CL0020188-5, CL0020188-6, CL0020188-7, | |
| and CL0020188-8 | |
| CL0020306 CDR-L3; CL0020307 CDR- | QQFLEFPFT (SEQ ID NO: 2697) |
| L3; CL0020307-1 CDR-L3 | |
| CL0020307 V_{H} | EVKLLESGGGLVQPGGSLRLSCAASGFTFTNFYM |
| | SWIRQPPGRAPEWLGVIRNRPNGYTTDYNPSVKG |
| | RFTISRDNTQNILYLQMSTLRADDTAFYYCTRLTY |
| | GFDYWGQGVMVTVSS (SEQ ID NO: 2698) |
| CL0020307 VL | DIVMTQGALPNPVPSGESASITCQSSKSLLHSNGK |
| | TYLNWYLQRPGQSPQLLIYWMSTRASGVSDRFSG |
| | SGSGTDFTLKIS |
| | SVEAEVVGVYYCQQFLEFPFTFGSGTKLEIK |
| | (SEQ ID NO: 2699) |
| CL0020307 CDR-H1 | GFTFTNFYMS (SEQ ID NO: 2700) |
| CL0020307 CDR-H2 | VIRNRPNGYTTDYNPSVKG (SEQ ID NO: 2701) |
| CL0020307 CDR-H3 | TRLTYGFDY (SEQ ID NO: 2702) |
| CL0020188 VH | EVKLLDSGGGLVQAGGSLRLSCAGSGFTFTDFYM |
| | SWIRQPPGKAPEWLGVIRNKANGYTAGYNPSVK |
| | GRFTISRDNTQNILYLQMNTLRAEDTAIYYCARLT |
| | YGFDYWGQGVMVTVSS (SEQ ID NO: 2703) |
| CL0020188 VL | DIVMTQGALPNPVPSGESASITCQSSKSLLHSNGK |
| | TYLNWYLQR |
| | PGQSPQLLIYWMSTRASGVSDRFSGSGSGTDFTLK |
| | ISSVEAEDVGVYYCQQFLEYPFTFGSGTKLEIK |
| | (SEQ ID NO: 2704) |
| CDR-H3 for CL0020188 and variants | ARLTYGFDY (SEQ ID NO: 2705) |
| CL0020188-1, CL0020188-2, CL0020188-3, | |
| CL0020188-4, CL0020188-5, | |
| CL0020188-6, CL0020188-7, and | |
| CL0020188-8 | |
| CDR-L3 for CL0020188 and variants | QQFLEYPFT (SEQ ID NO: 2706) |
| CL0020188-1, CL0020188-2, CL0020188- | |
| 3, CL0020188-4, CL0020188-5, | |
| CL0020188-6, CL0020188-7, and | |
| CL0020188-8 | |
| CL0020188-1 VH; CL0020188-3 VH | EVQLVESGGGLVQPGGSLRLSCAASGFTFTDFYM |
| | SWVRQAPGKGLEWVSVIRNKANGYTAGYNPSVK |
| | GRFTISRDNSKNTLYLQMNSLRAEDTAVYYCARL |
| | TYGFDYWGQGTLVTVSS (SEQ ID NO: 2707) |
| CL0020188-1 VL; CL0020188-2 VL; | DIVMTQTPLSLPVTPGEPASISCQSSKSLLHSNGKT |
| CL0020188-5 VL; CL0020188-6 VL | YLNWYLQKPGQSPQLLIYWMSTRASGVPDRFSGS |
| | GSGTDFTLKISRVEAEDVGVYYCQQFLEYPFTFG |
| | QGTKVEIK (SEQ ID NO: 2708) |
| CL0020188-2 VH | EVQLVESGGGLVQPGGSLRLSCAGSGFTFTDFYM |
| | SWVRQAPGKGLEWVSVIRNKANGYTAGYNPSVK |
| | GRFTISRDNSKNTLYLQMNSLRAEDTAVYYCARL |
| | TYGFDYWGQGTLVTVSS (SEQ ID NO: 2709) |
| CL0020188-3 VL; CL0020188-4 VL; | DIVMTQTPLSLPVTPGEPASISCQSSKSLLHSTGKT |
| CL0020188-7 VL; CL0020188-8 VL | YLNWYLQKPGQSPQLLIYWMSTRASGVPDRFSGS |
| | GSGTDFTLKISRVEAEDVGVYYCQQFLEYPFTFG |
| | QGTKVEIK (SEQ ID NO: 2710) |
| CDR-L1 for variants CL0020188-3, | QSSKSLLHSTGKTYLN (SEQ ID NO: 2711) |
| CL0020188-4, CL0020188-7, and | |
| CL0020188-8 | |
| CL0020188-5 VH; CL0020188-7 VH | EVQLVESGGGLVQPGGSLRLSCAASGFTFTDFYM |
| | SWVRQAPGKGLEWVSVIRNKANAYTAGYNPSVK |
| | GRFTISRDNSKNTLYLQMNSLRAEDTAVYYCARL |
| | TYGFDYWGQGTLVTVSS (SEQ ID NO: 2712) |
| CDR-H2 for variants CL0020188-5, | VIRNKANAYTAGYNPSVKG (SEQ ID NO: 2713) |
| CL0020188-6, CL0020188-7, and | |
| CL0020188-8 | |
| CL0020188-6 VH; CL0020188-8 VH | EVQLVESGGGLVQPGGSLRLSCAGSGFTFTDFYM |
| | SWVRQAPGKGPEWLSVIRNKANAYTAGYNPSVK |
| | GRFTISRDNSKNTLYLQMNSLRAEDTAVYYCARL |
| | TYGFDYWGQGTLVTVSS (SEQ ID NO: 2714) |
| CL0020123 VH | EVQLQQSGAELVRSGASVKLSCTASGFSIEDFYIH |
| | WVKQRPEQGLEWIGWIDPENGDSKYAPKFQGKA |
| | TMTADTSSNTAYLHLSSLTSEDTAVYYCHADHGN |
| | YGSTMDYWGQGTSVTVSS (SEQ ID NO: 2715) |
| CL0020123 VL | DIQMNQSPSSLSASLGDTVTITCHASQHINVWLSW |
| | YQQKPGDHPKLLIYKASNLHTGVPSRFSGSGSGT |
| | GFTLTISSLQPEDIATYYCQQGQTYPRTFGGGTKL |
| | EIK (SEQ ID NO: 2716) |
| CDR-H1 for CL0020123 and variants | GFSIEDFYIH (SEQ ID NO: 2717) |
| CL0020123-1, CL0020123-2, CL0020123- | |
| 3, CL0020123-4, CL0020123-5, | |
| CL0020123-6, CL0020123-7, and | |
| CL0020123-8 | |
| CDR-H2 for CL0020123 and variants | WIDPENGDSKYAPKFQG (SEQ ID NO: 2718) |
| CL0020123-1 and CL0020123-2 | |
| CDR-H3 for CL0020123 and variants | HADHGNYGSTMDY (SEQ ID NO: 2719) |
| CL0020123-1, CL0020123-2, CL0020123- | |
| 3, CL0020123-4, CL0020123-5, | |
| CL0020123-6, CL0020123-7, and | |
| CL0020123-8 | |
| CDR-L1 for CL0020123 and variants | HASQHINVWLS (SEQ ID NO: 2720) |
| CL0020123-1, CL0020123-2, CL0020123- | |
| 3, CL0020123-4, CL0020123-5, | |
| CL0020123-6, CL0020123-7, and | |
| CL0020123-8 | |
| CDR-L2 for CL0020123 and variants | KASNLHT (SEQ ID NO: 2721) |
| CL0020123-1, CL0020123-2, CL0020123-3, | |
| CL0020123-4, CL0020123-5, | |
| CL0020123-6, CL0020123-7, and | |
| CL0020123-8 | |
| CDR-L3 for CL0020123 and variants | QQGQTYPRT (SEQ ID NO: 2722) |
| CL0020123-1, CL0020123-2, CL0020123-3, | |
| CL0020123-4, CL0020123-5, | |
| CL0020123-6, CL0020123-7, and | |
| CL0020123-8 | |
| CL0020123-1 VH | QVQLVQSGAEVKKPGASVKVSCKASGFSIEDFYI |
| | HWVRQAPGQGLEWMGWIDPENGDSKYAPKFQG |
| | RATITADTSTSTAYMELSSLRSEDTAVYYCHADH |
| | GNYGSTMDYWGQGTLVTVSS (SEQ ID NO: 2723) |
| CL0020123-1 VL; CL0020123-2 VL; | DIQMTQSPSSLSASVGDRVTITCHASQHINVWLS |
| CL0020123-3 VL; CL0020123-4 VL | WYQQKPGKAPKLLIYKASNLHTGVPSRFSGSGSG |
| CL0020123-5 VL; CL0020123-6 VL; | TDFTLTISSLQPEDFATYYCQQGQTYPRTFGQGTK |
| CL0020123-7 VL; CL0020123-8 VL | VEIK (SEQ ID NO: 2724) |
| CL0020123-2 VH | QVQLVQSGAEVKKPGASVKVSCKASGFSIEDFYI |
| | HWVRQAPGQGLEWMGWIDPENGDSKYAPKFQG |
| | RVTITADTSTSTAYMELSSLRSEDTAVYYCHADH |
| | GNYGSTMDYWGQGTLVTVSS (SEQ ID NO: 2725) |
| CL0020123-3 VH | QVQLVQSGAEVKKPGASVKVSCKASGFSIEDFYI |
| | HWVRQAPGQGLEWMGWIDPEQGDSKYAPKFQG |
| | RATITADTSTSTAYMELSSLRSEDTAVYYCHADH |
| | GNYGSTMDYWGQGTLVTVSS (SEQ ID NO: 2726) |
| CDR-H2 for variants CL0020123-3 and | WIDPEQGDSKYAPKFQG (SEQ ID NO: 2727) |
| CL0020123-6 | |
| CL0020123-4 VH | QVQLVQSGAEVKKPGASVKVSCKASGFSIEDFYI |
| | HWVRQAPGQGLEWMGWIDPENGESKYAPKFQG |
| | RATITADTSTSTAYMELSSLRSEDTAVYYCHADH |
| | GNYGSTMDYWGQGTLVTVSS (SEQ ID NO: 2728) |
| CDR-H2 for variants CL0020123-4 and | WIDPENGESKYAPKFQG (SEQ ID NO: 2729) |
| CL0020123-7 | |
| CL0020123-5 VH | QVQLVQSGAEVKKPGASVKVSCKASGFSIEDFYI |
| | HWVRQAPGQGLEWMGWIDPEQGESKYAPKFQG |
| | RATITADTSTSTAYMELSSLRSEDTAVYYCHADH |
| | GNYGSTMDYWGQGTLVTVSS (SEQ ID NO: 2730) |
| CDR-H2 for variants CL0020123-5 and | WIDPEQGESKYAPKFQG (SEQ ID NO: 2731) |
| CL0020123-8 | |
| CL0020123-6 VH | QVQLVQSGAEVKKPGASVKVSCKASGFSIEDFYI |
| | HWVRQAPGQGLEWMGWIDPEQGDSKYAPKFQG |
| | RVTITADTSTSTAYMELSSLRSEDTAVYYCHADH |
| | GNYGSTMDYWGQGTLVTVSS (SEQ ID NO: 2732) |
| CL0020123-7 VH | QVQLVQSGAEVKKPGASVKVSCKASGFSIEDFYI |
| | HWVRQAPGQGLEWMGWIDPENGESKYAPKFQG |
| | RVTITADTSTSTAYMELSSLRSEDTAVYYCHADH |
| | GNYGSTMDYWGQGTLVTVSS (SEQ ID NO: 2733) |
| CL0020123-8 VH | QVQLVQSGAEVKKPGASVKVSCKASGFSIEDFYI |
| | HWVRQAPGQGLEWMGWIDPEQGESKYAPKFQG |
| | RVTITADTSTSTAYMELSSLRSEDTAVYYCHADH |
| | GNYGSTMDYWGQGTLVTVSS (SEQ ID NO: 2734) |
| CDR-H2 consensus sequence | W-I-D-P-E-β6-G-β8-S-K-Y-A-P-K-F-Q-G, wherein (β6 |
| | is N or Q and (β8 is D or E (SEQ ID NO: 2735) |
| CDR-H1 consensus sequence | G-F-T-F-T-α6-F-Y-M-S, wherein α6 is D or N |
| | (SEQ ID NO: 2736) |
| CDR-H2 consensus sequence | V-I-R-N-β5-β6-N-β8-Y-T-β11-β12-Y-N-P-S-V-K-G, |
| | wherein β5 is K or R; β6 is A or P; β8 is G or A; |
| | β11 is A or T; and β12 is G or D (SEQ ID NO: 2737) |
| CDR-H3 consensus sequence | γ1-R-L-γ4-Y-G-F-D-Y, wherein γ1 is A or T; and γ4 |
| | is T or S (SEQ ID NO: 2738) |
| CDR-L1 consensus sequence | Q-S-S-K-S-L-L-H-S-δ10-G-K-T-Y-L-N, wherein δ10 is |
| | N or T (SEQ ID NO: 2739) |
| CDR-L3 consensus sequence | Q-Q-F-L-E-f6-P-F-T, wherein f6 is Y or F |
| | (SEQ ID NO: 2740) |
| CL0020307-1 VL | DIVMTQSPDSLAVSLGERATINCQSSKSLLHSNGK |
| | TYLNWYQQKPGQPPKLLIYWMSTRASGVPDRFS |
| | GSGSGTDFTLTISSLQAEDVAVYYCQQFLEFPFTF |
| | GQGTKVEIK (SEQ ID NO: 2741) |
| TREM2 epitope | FPGESES (SEQ ID NO: 2742) |
| TREM2 epitope | GEKGPCQRV (SEQ ID NO: 2743) |
| TREM2 epitope | TLRNLQPHDAGL (SEQ ID NO: 2744) |
| TREM2 epitope | VEVL (SEQ ID NO: 2745) |
| Reference antibody #1 VL | DIQMTQSPSSVSASVGDRVTITCRASQGISNWLA |
| | WYQQKPGKAPKLLIYAASSLQVGVPLRFSGSGSG |
| | TDFTLTISSLQPEDFATYYCQQADSFPRNFGQGTK |
| | LEIK (SEQ ID NO: 2746) |
| Reference antibody #1 VH | EVQLVQSGAEVKKPGESLKISCKGSGHSFTNYWI |
| | AWVRQMPGKGLEWMGIIYPGDSDTRYSPSFQGQ |
| | VTISADKSISTAYLQWSSLKASDTAVYFCARQRTF |
| | YYDSSGYFDYWGQGTLVTVSS (SEQ ID NO: 2747) |
| Reference antibody #2 VL | DIQMTQSPSSVSASVGDRVTITCRASQGISSWLAW |
| | YQQKPGKAPKLLIYAASSLQNGVPSRFSGSGSGT |
| | DFTLTISSLQPEDFATYFCQQADSFPRTFGQGTKL |
| | EIK (SEQ ID NO: 2748) |
| Reference antibody #2 VH | EVQLVQSGAEVKKPGESLKISCKGSGYSFTSYWIA |
| | WVRQMPGKGLEWMGIIYPGDSDTRYSPSFQGQV |
| | TISADKSISTAYLQWSSLKASDTAMYFCARQRTF |
| | YYDSSDYFDYWGQGTLVTVSS (SEQ ID NO: 2749) |
| Reference antibody #3 VL | DVVMTQSPDSLAVSLGERATINCRSSQSLVHSNR |
| | YTYLHWYQQKPGQSPKWYKVSNRFSGVPDRFS |
| | GSGSGTDFTLKISRVEAEDVGVYYCSQSTRVPYTF |
| | GQGTKLEIK (SEQ ID NO: 2750) |
| Reference antibody #3 VH | QVQLVQSGAEVKKPGASVKVSCKASGYAFSSQW |
| | MNWVRQAPGQRLEWIGRIYPGGGDTNYAGKFQG |
| | RVTITADTSASTAYMELSSLRSEDTAVYYCARLL |
| | RNQPGESYAMDYWGQGTLVTVSS |
| | (SEQ ID NO: 2751) |
| CL0020188-4 VH | EVQLVESGGGLVQPGGSLRLSCAGSGFTFTDFYM |
| | SWVRQAPGKGPEWLSVIRNKANGYTAGYNPSVK |
| | GRFTISRDNSKNTLYLQMNSLRAEDTAVYYCARL |
| | TYGFDYWGQGTLVTVSS (SEQ ID NO: 2752) |

[0578] In some embodiments, each of the light chain variable regions and each of the heavy chain variable regions disclosed in TABLE L1 as well as specific combinations thereof and other embodiments of the anti-TREM2 antibody described in the '450 application and herein may be attached to the light chain constant regions (TABLE EN1) and heavy chain constant regions (TABLE EN2) to form complete antibody light and heavy chains, respectively, as further discussed below. Further, each of the generated heavy and light chain sequences may be combined to form a complete antibody structure. It should be understood that the heavy chain and light chain variable regions provided herein can also be attached to other constant domains having different sequences than the exemplary sequences listed herein.

[0579] M. PCT Patent Application Publication No. WO2021/101823A1

[0580] In some embodiments, the TREM2 agonist is an antibody, or an antigen-binding fragment thereof, as described in PCT Patent Application Publication No. WO2021/101823A1 (“the '823 application”), which is incorporated by reference herein, in its entirety.

[0581] In some embodiments, the antibody or antigen-binding fragment thereof comprises:

(a) a CDR-H1 sequence comprising the sequence of GFSFNTYWIG (SEQ ID NO:2753);
(b) a CDR-H2 sequence comprising the sequence of IIPGDQDIRYSPSFQG (SEQ ID NO:2754;
(c) a CDR-H3 sequence comprising the sequence of ARYGRYIYGYGGYHGMDV (SEQ ID NO:2755;
(d) CDR-L1 sequence comprising the sequence of RASQAIRDDLG (SEQ ID NO:2756);
(e) a CDR-L2 sequence comprising the sequence of YAASSLQS (SEQ ID NO:2757); and
(f) a CDR-L3 sequence comprising the sequence of LQNYNYPHT (SEQ ID NO:2758).

[0582] In some embodiments, the antibody or antigen-binding fragment comprises a CDR-H1 comprising the amino acid sequence of SEQ ID NO:2753, a CDR-H2 comprising the amino acid sequence of SEQ ID NO:2754, a CDR-H3 comprising the amino acid sequence of SEQ ID NO:2755, a CDR-L1 comprising the amino acid sequence of SEQ ID NO:2756, a CDR-L2 comprising the amino acid sequence of SEQ ID NO:2757, and a CDR-L3 comprising the amino acid sequence of SEQ ID NO:2758.

[0583] In some embodiments, the antibody or antigen-binding fragment comprises a V_{H} sequence that has at least 85% sequence identity to SEQ ID NO:2759. In some embodiments, the V_{H} sequence has at least 90% sequence identity to SEQ ID NO:2759. In some embodiments, the V_{H} sequence has at least 95% sequence identity to SEQ ID NO:2759. In some embodiments, the V_{H} sequence comprises SEQ ID NO:2759.

[0584] In some embodiments, the antibody or antigen-binding fragment comprises a V_{L} sequence that has at least 85% sequence identity to SEQ ID NO:2760. In some embodiments, the V_{L} sequence has at least 90% sequence identity to SEQ ID NO:2760. In some embodiments, the V_{L} sequence has at least 95% sequence identity to SEQ ID NO:2760. In some embodiments, the V_{L} sequence comprises SEQ ID NO:2760.

[0585] In some embodiments, the antibody or antigen-binding fragment comprises a VH sequence comprising SEQ ID NO:2759 and a VL sequence comprising SEQ ID NO:2760.

[0586] In some embodiments, an antibody or antigen-binding fragment thereof that specifically binds to TREM2 recognizes an epitope that is the same or substantially the same as the epitope recognized by Antibody 1 of the '823 application.

[0587] In some embodiments, the antibody or antigen-binding fragment recognizes an epitope present on the extracellular domain of a human TREM2. In particular embodiments, the antibody or antigen-binding fragment recognizes an epitope present on the extracellular domain of a human TREM2 in SEQ ID NO:2763. In some embodiments, the antibody or antigen-binding fragment recognizes an epitope present on the extracellular domain of a mouse TREM2. In particular embodiments, the antibody or antigen-binding fragment recognizes an epitope present on the extracellular domain of a mouse TREM2 in SEQ ID NO:2764. In some embodiments, the antibody or antigen-binding fragment recognizes an epitope present on the extracellular domain of a rat TREM2. In particular embodiments, the antibody or antigen-binding fragment recognizes an epitope present on the extracellular domain of a rat TREM2 in SEQ ID NO:2765. In some embodiments, the antibody or antigen-binding fragment recognizes an epitope present on the extracellular domain of a rabbit TREM2. In particular embodiments, the antibody or antigen-binding fragment recognizes an epitope present on the extracellular domain of a rabbit TREM2 in SEQ ID NO:2766. In some embodiments, the antibody or antigen-binding fragment recognizes an epitope present on the extracellular domain of a cynomolgus monkey TREM2. In particular embodiments, the antibody or antigen-binding fragment recognizes an epitope present on the extracellular domain of a cynomolgus monkey TREM2 in SEQ ID NO:2767.

[0588] In some embodiments, the antibody is an antibody having a VL, VH, full heavy chain sequence, full light chain sequence, a CDR sequence, or a full sequence disclosed in the “SEQUENCE” Table of PCT Patent Application Publication No. WO2021/101823A1, which are reproduced below as TABLE M1.

TABLE M1

| Description | Sequence |
|---|---|
| ′823 Antibody 1 CDR-H1 | GFSFNTYWIG (SEQ ID NO: 2753) |
| ′823 Antibody 1 CDR-H2 | IIYPGDQDIRYSPSFQG (SEQ ID NO: 2754) |
| ′823 Antibody 1 CDR-H3 | ARYGRYIYGYGGYHGMDV (SEQ ID NO: 2755) |
| ′823 Antibody 1 CDR-L1 | RASQAIRDDLG (SEQ ID NO: 2756) |
| ′823 Antibody 1 CDR-L2 | YAASSLQS (SEQ ID NO: 2757 |
| ′823 Antibody 1 CDR-L3 | LQNYNYPHT (SEQ ID NO: 2758) |
| ′823 Antibody 1 VH | EVQLVQSGAEVKKPGESLKISCKGSGFSFNTYWIGWVRQMPG |
| | KGLEWMGIIYPGDQDIRYSPSFQGQVTISADKSISTAYLQWSSL |
| | KASDTAMYYCARYGRYIYGYGGYHGMDVWGQGTTVTVSS |
| | (SEQ ID NO: 2759) |
| ′823 Antibody 1 VL | DIQMTQSPSSLSASVGDRVTITCRASQAIRDDLGWYQQKPGKA |
| | PKLLIYAASSLQSGVPSRFSGSGSGTDFTLTISSLQPEDFATYYC |
| | LQNYNYPHTFGQGTKLEIK (SEQ ID NO: 2760) |
| ′823 Antibody 1 Heavy | EVQLVQSGAEVKKPGESLKISCKGSGFSFNTYWIGWVRQMPG |
| Chain | KGLEWMGIIYPGDQDIRYSPSFQGQVTISADKSISTAYLQWSSL |
| | KASDTAMYYCARYGRYIYGYGGYHGMDVWGQGTTVTVSSA |
| | STKGPSVFPLAPCSRSTSESTAALGCLVKDYFPEPVTVSWNSG |
| | ALTSGVHTFPAVLQSSGLYSLSSVVTVPSSSLGTKTYTCNVDH |
| | KPSNTKVDKRVESKYGPPCPPCPAPEAAGGPSVFLFPPKPKDT |
| | LMISRTPEVTCVVVDVSQEDPEVQFNWYVDGVEVHNAKTKP |
| | REEQFNSTYRVVSVLTVLHQDWLNGKEYKCKVSNKGLPSSIE |
| | KTISKAKGQPREPQVYTLPP SQEEMTKNQVSLTCLVKGFYPSD |
| | IAVEWESNGQPENNYKTTPPVLDSDGSFFLYSRLTVDKSRWQE |
| | GNVFSCSVMHEALHNHYTQKSLSLSLG (SEQ ID NO: 2761) |
| ′823 Antibody 1 Light Chain | DIQMTQSPSSLSASVGDRVTITCRASQAIRDDLGWYQQKPGKA |
| | PKLLIYAASSLQSGVPSRFSGSGSGTDFTLTISSLQPEDFATYYC |
| | LQNYNYPHTFGQGTKLEIKRTVAAPSVFIFPPSDEQLKSGTASV |
| | VCLLNNFYPREAKVQWKVDNALQSGNSQESVTEQDSKDSTYS |
| | LSSTLTLSKADYEKHKVYACEVTHQGLSSPVTKSFNRGEC |
| | (SEQ ID NO: 2762) |
| Human TREM2 ECD-His | HNTTVFQGVAGQSLQVSCPYDSMKHWGRRKAWCRQLGEKG |
| | PCQRVVSTHNLWLLSFLRRWNGSTAITDDTLGGTLTITLRNLQ |
| | PHDAGLYQCQSLHGSEADTLRKVLVEVLADPLDHRDAGDLW |
| | FPGESESFEDAHVEHSISRSLLEGEIPFPPTSHHHHHH |
| | (SEQ ID NO: 2763) |
| Mouse TREM2 ECD-His | LNTTVLQGMAGQSLRVSCTYDALKHWGRRKAWCRQLGEEG |
| | PCQRVVSTHGVWLLAFLKKRNGSTVIADDTLAGTVTITLKNL |
| | QAGDAGLYQCQSLRGREAEVLQKVLVEVLEDPLDDQDAGDL |
| | WVPEESS SFEGAQVEHSTSRNQETSFPPTSHHHHHH |
| | (SEQ ID NO: 2764) |
| Rat TREM2 ECD-His | NTTVFQGVAGQSLRVSCPYDSATHWGRRKAWCRQLGEEGPC |
| | ERVVSTHSWWLLSFLKRRNGSTAITDDALGGTLTVTLRDLQA |
| | QDAGVYQCQSLQGREASTLQKILVEVLTEPLEHEHAGDFWVP |
| | EESGSFEDPPVERSSSRSPSEGEPSFPPASGGGGQHHHHHH |
| | (SEQ ID NO: 2765) |
| Rabbit TREM2 ECD-His | NTTVLQGVAGQSLRVSCTYDALRHWGRRKAWCRQLAEEGPC |
| | QRVVSTHGVWLLAFLRKQNGSTVITDDTLAGTVTITLRNLQA |
| | GDAGLYQCQSLRGREAEVLQKVVVEVLEDPLDDQDAGDLWV |
| | PEESESFEGAQVEHSTSRSQSGGGGQHHHHHH |
| | (SEQ ID NO: 2766) |
| Cynomolgus monkey | HNTTVFQGVEGQSLQVSCPYDSMKHWGRRKAWCRQLGEKGP |
| TREM2 ECD-His | CQRVVSTHNLWLLSFLRRRNGSTAITDDTLGGTLTITLRNLQPH |
| | DAGFYQCQSLHGSEADTLRKVLVEVLADPLDHRDAGDLWVP |
| | GESESFEDAHVEHSISRPSQGSHLPSCLSKEGGGGQHHHHHH |
| | (SEQ ID NO: 2767) |

[0589] In some embodiments, each of the light chain variable regions and each of the heavy chain variable regions disclosed in TABLE M1 as well as specific combinations thereof and other embodiments of the anti-TREM2 antibody described in the '823 application and herein may be attached to the light chain constant regions (TABLE EN1) and heavy chain constant regions (TABLE EN2) to form complete antibody light and heavy chains, respectively, as further discussed below. Further, each of the generated heavy and light chain sequences may be combined to form a complete antibody structure. It should be understood that the heavy chain and light chain variable regions provided herein can also be attached to other constant domains having different sequences than the exemplary sequences listed herein.

[0590] Exemplary Anti-TREM2 Antibodies

[0591] In some embodiments, the TREM2 agonist antigen binding protein comprises a CDRL1 or a variant thereof having one, two, three or four amino acid substitutions; a CDRL2, or a variant thereof having one, two, three or four amino acid substitutions; a CDRL3, or a variant thereof having one, two, three or four amino acid substitutions; a CDRH1, or a variant thereof having one, two, three or four amino acid substitutions; a CDRH2, or a variant thereof having one, two, three or four amino acid substitutions; and a CDRH3, or a variant thereof having one, two, three or four amino acid substitutions, where the amino acid sequences of the CDRL1, CDRL2, CDRL3, CDRH1, CDRH2, and CDRH3 are provided in TABLES EX1 and EX2 below, along with exemplary light chain and variable regions.

TABLE EX1
Exemplary Anti-TREM2 Antibody Light Chain Variable Regions

| VL Amino Acid Sequence | CDRL1 | CDRL2 | CDRL3 |
|---|---|---|---|
| EIVMTQSPATLSVSPGERATLSCR | RASQSVSSNLA | GASTRAT | LQDNNFPPT |
| ASQSVSSNLAWFQQKPGQAPRLL | (SEQ ID NO: 10) | (SEQ ID NO: 23) | (SEQ ID NO: 372) |
| IYGASTRATGIPARFSGSGSGTEF | | | |
| TLTISSLQPEDFAVYYCLQDNNFP | | | |
| PTFGQGTKVDIK (SEQ ID NO: 330) | | | |

TABLE EX2
Exemplary Anti-TREM2 Antibody Heavy Chain Variable Regions

| VH Amino Acid Sequence | CDRH1 | CDRH2 | CDRH3 |
|---|---|---|---|
| EVQLVQSGAEVKKPGESLKIS | SWIG | IIYPGDADARYSPSF | RRQGIFGDALDF |
| CKGSGYSFTSYWIGWVRQMP | (SEQ ID NO: 81) | QG (SEQ ID NO: 373) | (SEQ ID NO: 374) |
| GKGLEWMGIIYPGDADARYS | | | |
| PSFQGQVTISADKSISTAYLQ | | | |
| WSSLKASDTAMYFCARRRQ | | | |
| GIFGDALDFWGQGTLVTVSS | | | |
| (SEQ ID NO: 331) | | | |

[0592] As noted above, anti-TREM2 antibodies may comprise one or more of the CDRs presented in TABLE EX1 (light chain CDRs; i.e. CDRLs) and TABLE EX2 (heavy chain CDRs, i.e. CDRHs).

[0593] In some embodiments, an anti-TREM2 antibody comprises a light chain comprising a CDRL1 having an amino acid sequence according to SEQ ID NO:10, a CDRL2 having an amino acid sequence according to SEQ ID NO:23, a CDRL3 having an amino acid sequence according to SEQ ID NO:372, or any CDRL1, CDRL2, or CDRL3 amino acid sequence that contains one or more, e.g., one, two, three, four or more amino acid substitutions (e.g., conservative amino acid substitutions), deletions or insertions of no more than five, four, three, two, or one amino acids to any of SEQ ID NOS:10, 23, and 372. Such substitutions, deletions, and insertions would retain significant anti-TREM2 binding activity In these and other embodiments, an anti-TREM2 antibody comprises a CDRH1 having an amino acid sequence according to SEQ ID NO:81, a CDRH2 having an amino acid sequence according to SEQ ID NO:373, a CDRH3 having an amino acid sequence according to SEQ ID NO:374, or any CDRH1, CDRH2, or CDRH3 having an amino acid sequence that contains one or more, e.g., one, two, three, four or more amino acid substitutions (e.g., conservative amino acid substitutions), deletions or insertions of no more than five, four, three, two, or one amino acids to any of SEQ ID NOS:81, 373, and 374. Such substitutions, deletions, and insertions would retain significant anti-TREM2 binding activity

[0594] In some embodiments, an anti-TREM2 antibody comprises a light chain variable region comprising a CDRL1 having an amino acid sequence according to SEQ ID NO:10; a CDRL2 having an amino acid sequence according to SEQ ID NO:23; and a CDRL3 having an amino acid sequence according to SEQ ID NO:372, and a heavy chain variable region comprising a CDRH1 having an amino acid sequence according to SEQ ID NO:81; a CDRH2 having an amino acid sequence according to SEQ ID NO:373; and a CDRH3 having an amino acid sequence according to SEQ ID NO:374.

[0595] In some embodiments, an anti-TREM2 antibody comprises a light chain variable region having an amino acid sequence according to SEQ ID NO:330, or any amino acid sequence that contains one or more, e.g., one, two, three, four or more amino acid substitutions (e.g., conservative amino acid substitutions), deletions or insertions of no more than five, four, three, two, or one amino acids to SEQ ID NO:330. Such substitutions, deletions, and insertions would retain significant anti-TREM2 binding activity. In some embodiments, an anti-TREM2 antibody comprises a heavy chain variable region having an amino acid sequence according to SEQ ID NO:331, or any amino acid sequence that contains one or more, e.g., one, two, three, four or more amino acid substitutions (e.g., conservative amino acid substitutions), deletions or insertions of no more than five, four, three, two, or one amino acids to SEQ ID NO:331. Such substitutions, deletions, and insertions would retain significant anti-TREM2 binding activity.

[0596] In specific embodiments, an anti-TREM2 antibody comprises a light chain variable region having an amino acid sequence according to SEQ ID NO:330, and a heavy chain variable region having an amino acid sequence according to SEQ ID NO:331.

[0597] In some embodiments, an anti-TREM2 antibody comprises a heavy chain amino acid sequence, and/or a light chain amino acid sequence selected from TABLE EX3. TABLE EX3 shows exemplary anti-TREM2 antibody heavy and light chains for exemplary antibodies “Ab-1”, “Ab-2”, and “Ab-3”.

TABLE EX3
Exemplary Anti-TREM2 Antibody Heavy and Light Chains

| Chain | Description | Amino Acid Sequence |
|---|---|---|
| Light | Ab-1 | EIVMTQSPATLSVSPGERATLSCRASQSVSSNLAWFQQKPGQAPRLLI |
| Chain | | YGASTRATGIPARFSGSGSGTEFTLTISSLQPEDFAVYYCLQDNNFPPT |
| | | FGQGTKVDIKRTVAAPSVFIFPPSDEQLKSGTASVVCLLNNFYPREAK |
| | | VQWKVDNALQSGNSQESVTEQDSKDSTYSLSSTLTLSKADYEKHKV |
| | | YACEVTHQGLSSPVTKSFNRGEC (SEQ ID NO: 2777) |
| | Ab-1 w/ | MDMRVPAQLLGLLLLWLRGARCEIVMTQSPATLSVSPGERATLSCR |
| | leader | ASQSVSSNLAWFQQKPGQAPRLLIYGASTRATGIPARFSGSGSGTEFT |
| | sequence | LTISSLQPEDFAVYYCLQDNNFPPTFGQGTKVDIKRTVAAPSVFIFPPS |
| | | DEQLKSGTASVVCLLNNFYPREAKVQWKVDNALQSGNSQESVTEQ |
| | | DSKDSTYSLSSTLTLSKADYEKHKVYACEVTHQGLSSPVTKSFNRGE |
| | | C (SEQ ID NO: 339) |
| | Ab-2 | EIVMTQSPATLSVSPGERATLSCRASQSVSSNLAWFQQKPGQAPRLLI |
| | | YGASTRATGIPARFSGSGSGTEFTLTISSLQPEDFAVYYCLQDNNFPPT |
| | | FGQGTKVDIKRADAAPTVSIFPPSSEQLTSGGASVVCFLNNFYPKDIN |
| | | VKWKIDGSERQNGVLNSWTDQDSKDSTYSMSSTLTLTKDEYERHNS |
| | | YTCEATHKTSTSPIVKSFNRNEC (SEQ ID NO: 2780) |
| | Ab-3 | EIVMTQSPATLSVSPGERATLSCRASQSVSSNLAWFQQKPGQAPRLLI |
| | | YGASTRATGIPARFSGSGSGTEFTLTISSLQPEDFAVYYCLQDNNFPPT |
| | | FGQGTKVDIKRADAAPTVSIFPPSSEQLTSGGASVVCFLNNFYPKDIN |
| | | VKWKIDGSERQNGVLNSWTDQDSKDSTYSMSSTLTLTKDEYERHNS |
| | | YTCEATHKTSTSPIVKSFNRNEC (SEQ ID NO: 2780) |
| Heavy | Ab-1 | EVQLVQSGAEVKKPGESLKISCKGSGYSFTSYWIGWVRQMPGKGLE |
| Chain | | WMGIIYPGDADARYSPSFQGQVTISADKSISTAYLQWSSLKASDTAM |
| | | YFCARRRQGIFGDALDFWGQGTLVTVSSASTKGPSVFPLAPSSKSTS |
| | | GGTAALGCLVKDYFPEPVTVSWNSGALTSGVHTFPAVLQSSGLYSLS |
| | | SVVTVPSSSLGTQTYICNVNHKPSNTKVDKKVEPKSCDKTHTCPPCP |
| | | APELLGGPSVFLFPPKPKDTLMISRTPEVTCVVVDVSHEDPEVKFNW |
| | | YVDGVEVHNAKTKPCEEQYGSTYRCVSVLTVLHQDWLNGKEYKCK |
| | | VSNKALPAPIEKTISKAKGQPREPQVYTLPPSREEMTKNQVSLTCLVK |
| | | GFYPSDIAVEWESNGQPENNYKTTPPVLDSDGSFFLYSKLTVDKSRW |
| | | QQGNVFSCSVMHEALHNHYTQKSLSLSPGK (SEQ ID NO: 2774) |
| | Ab-1 w/ | MDMRVPAQLLGLLLLWLRGARCEVQLVQSGAEVKKPGESLKISCK |
| | leader | GSGYSFTSYWIGWVRQMPGKGLEWMGITYPGDADARYSPSFQGQVT |
| | sequence | ISADKSISTAYLQWSSLKASDTAMYFCARRRQGIFGDALDFWGQGTL |
| | | VTVSSASTKGPSVFPLAPSSKSTSGGTAALGCLVKDYFPEPVTVSWN |
| | | SGALTSGVHTFPAVLQSSGLYSLSSVVTVPSSSLGTQTYICNVNHKPS |
| | | NTKVDKKVEPKSCDKTHTCPPCPAPELLGGPSVFLFPPKPKDTLMISR |
| | | TPEVTCVVVDVSHEDPEVKFNWYVDGVEVHNAKTKPCEEQYGSTY |
| | | RCVSVLTVLHQDWLNGKEYKCKVSNKALPAPIEKTISKAKGQPREP |
| | | QVYTLPPSREEMTKNQVSLTCLVKGFYPSDIAVEWESNGQPENNYK |
| | | TTPPVLDSDGSFFLYSKLTVDKSRWQQGNVFSCSVMHEALHNHYTQ |
| | | KSLSLSPGK (SEQ ID NO: 340) |
| | Ab-2 | EVQLVQSGAEVKKPGESLKISCKGSGYSFTSYWIGWVRQMPGKGLE |
| | | WMGIIYPGDADARYSPSFQGQVTISADKSISTAYLQWSSLKASDTAM |
| | | YFCARRRQGIFGDALDFWGQGTLVTVSSAKTTPPSVYPLAPGSAAQT |
| | | NSMVTLGCLVKGYFPEPVTVTWNSGSLSSGVHTFPAVLQSDLYTLSS |
| | | SVTVPSSPRPSETVTCNVAHPASSTKVDKKIVPRDCGCKPCICTVPEV |
| | | SSVFIFPPKPKDVLTITLTPKVTCVVVDISKDDPEVQFSWFVDDVEVH |
| | | TAQTQPREEQFNSTFRSVSELPIMHQDWLNGKEFKCRVNSAAFPAPI |
| | | EKTISKTKGRPKAPQVYTIPPPKEQMAKDKVSLTCMITDFFPEDITVE |
| | | WQWNGQPAENYKNTQPIMNTNGSYFVYSKLNVQKSNWEAGNTFT |
| | | CSVLHEGLHNHHTEKSLSHSPGK (SEQ ID NO: 2781) |
| | Ab-3 | EVQLVQSGAEVKKPGESLKISCKGSGYSFTSYWIGWVRQMPGKGLE |
| | | WMGIIYPGDADARYSPSFQGQVTISADKSISTAYLQWSSLKASDTAM |
| | | YFCARRRQGIFGDALDFWGQGTLVTVSSAKTTPPSVYPLAPGSAAQT |
| | | NSMVTLGCLVKGYFPEPVTVTWNSGSLSSGVHTFPAVLQSDLYTLSS |
| | | SVTVPSSTWPSETVTCNVAHPASSTKVDKKIVPRDCGCKPCICTVPEV |
| | | SSVFIFPPKPKDVLTITLTPKVTCVVVDISKDDPEVQFSWFVDDVEVH |
| | | TAQTQPREEQFGSTFRSVSELPIMHQDWLNGKEFKCRVNSAAFPAPI |
| | | EKTISKTKGRPKAPQVYTIPPPKEQMAKDKVSLTCMITDFFPEDITVE |
| | | WQWNGQPAENYKNTQPIMDTDGSYFVYSKLNVQKSNWEAGNTFT |
| | | CSVLHEGLHNHHTEKSLSHSPGK (SEQ ID NO: 2779) |

[0598] In some embodiments, an anti-TREM2 antibody comprises a light chain having an amino acid sequence according to any one of SEQ ID NOS:2777, 339, and 2780, or any amino acid sequence that contains one or more, e.g., one, two, three, four or more amino acid substitutions (e.g., conservative amino acid substitutions), deletions or insertions of no more than five, four, three, two, or one amino acids to any one of SEQ ID NOS:2777, 339, and 2780. Such substitutions, deletions, and insertions would retain significant anti-TREM2 binding activity. In these and other embodiments, an anti-TREM2 antibody comprises a heavy chain having an amino acid sequence according to any one of SEQ ID NOS:2774, 340, 2779, and 2781, or any amino acid sequence that contains one or more, e.g., one, two, three, four or more amino acid substitutions (e.g., conservative amino acid substitutions), deletions or insertions of no more than five, four, three, two, or one amino acids to any one of SEQ ID NOS:2774, 340, 2779, and 2781. Such substitutions, deletions, and insertions would retain significant anti-TREM2 binding activity.

[0599] In some embodiments, an anti-TREM2 antibody comprises a light chain having an amino acid sequence according to SEQ ID NO:2777, and a heavy chain variable region having an amino acid sequence according to SEQ ID NO:2774. In some embodiments, an anti-TREM2 antibody comprises a light chain having an amino acid sequence according to SEQ ID NO:339, and a heavy chain variable region having an amino acid sequence according to SEQ ID NO:340. In some embodiments, an anti-TREM2 antibody comprises a light chain having an amino acid sequence according to SEQ ID NO:2780, and a heavy chain variable region having an amino acid sequence according to SEQ ID NO:2781. In some embodiments, an anti-TREM2 antibody comprises a light chain having an amino acid sequence according to SEQ ID NO:2780, and a heavy chain variable region having an amino acid sequence according to SEQ ID NO:2779.

[0600] Antibody Constant Domains and Engineered Constant Regions

[0601] In some embodiments, any of the antigen binding agents, can have a constant domain on the light chain and/or the heavy chain of any origin. The term “constant region” as used herein refers to all domains of an antibody other than the variable region. The constant domain can be that of rodent, primate or other mammals. In some embodiments, the constant domain is of human origin. Accordingly, in some embodiments, any of the antigen binding agents described herein can have a human constant region, some of which are described above.

[0602] In some embodiments, a human constant region is, for example, a human light chain constant region or a human constant heavy chain region.

[0603] The term “light chain” or “immunoglobulin light chain” refers to a polypeptide comprising, from amino terminus to carboxyl terminus, a single immunoglobulin light chain variable region (VL) and a single immunoglobulin light chain constant domain (CL). The immunoglobulin light chain constant domain (CL) can be a human kappa (κ) or human lambda (λ) constant domain.

[0604] The term “heavy chain” or “immunoglobulin heavy chain” refers to a polypeptide comprising, from amino terminus to carboxyl terminus, a single immunoglobulin heavy chain variable region (VH), an immunoglobulin heavy chain constant domain 1 (CH1), an immunoglobulin hinge region, an immunoglobulin heavy chain constant domain 2 (CH2), an immunoglobulin heavy chain constant domain 3 (CH3), and optionally an immunoglobulin heavy chain constant domain 4 (CH4). Heavy chains are classified as mu (μ), delta (Δ), gamma (γ), alpha (α), and epsilon (ε), and define the antibody's isotype as IgM, IgD, IgG, IgA, and IgE, respectively. The IgG-class and IgA-class antibodies are further divided into subclasses, namely, IgG1, IgG2, IgG3, and IgG4, and IgA1 and IgA2, respectively. The heavy chains in IgG, IgA, and IgD antibodies have three domains (CH1, CH2, and CH3), whereas the heavy chains in IgM and IgE antibodies have four domains (CH1, CH2, CH3, and CH4). The immunoglobulin heavy chain constant domains can be from any immunoglobulin isotype, including subtypes. The antibody chains are linked together via inter-polypeptide disulfide bonds between the CL domain and the CH1 domain (i.e. between the light and heavy chain) and between the hinge regions of the antibody heavy chains

[0605] In some embodiments, the human light chain constant region comprises a human kappa or human lambda constant region. In some embodiments, the antigen binding agents based on any light chain variable region or CDRs of a light chain variable region described herein includes a human light chain constant region, such as a kappa or lambda constant region sequences, which are found in all five antibody isotypes. Examples of human immunoglobulin light chain constant region sequences are shown in the following TABLE EN1.

TABLE EN1
Exemplary Human Immunoglobulin Light Chain Constant Regions

| Designation | CL Domain Amino Acid Sequence |
|---|---|
| Human lambda v1 | GQPKANPTVTLFPPSSEELQANKATLVCLISDFYPGAVTVAWKAD |
| | GSPVKAGVETTKPSKQSNNKYAASSYLSLTPEQWKSHRSYSCQVT |
| | HEGSTVEKTVAPTECS (SEQ ID NO: 191) |
| Human lambda v2 | GQPKAAPSVTLFPPSSEELQANKATLVCLISDFYPGAVTVAWKADS |
| | SPVKAGVETTTPSKQSNNKYAASSYLSLTPEQWKSHRSYSCQVTH |
| | EGSTVEKTVAPTECS (SEQ ID NO: 192) |
| Human lambda v3 | QPKAAPSVTLFPPSSEELQANKATLVCLISDFYPGAVTVAWKADSS |
| | PVKAGVETTTPSKQSNNKYAASSYLSLTPEQWKSHRSYSCQVTHE |
| | GSTVEKTVAPTECS (SEQ ID NO: 193) |
| Human lambda v4 | GQPKAAPSVTLFPPSSEELQANKATLVCLISDFYPGAVTVAWKADS |
| | SPVKAGVETTTPSKQSNNKYAASSYLSLTPEQWKSHKSYSCQVTH |
| | EGSTVEKTVAPTECS (SEQ ID NO: 194) |
| Human lambda v5 | GQPKAAPSVTLFPPSSEELQANKATLVCLVSDFYPGAVTVAWKAD |
| | GSPVKVGVETTKPSKQSNNKYAASSYLSLTPEQWKSHRSYSCRVT |
| | HEGSTVEKTVAPAECS (SEQ ID NO: 195) |
| Human kappa v1 | TVAAPSVFIFPPSDEQLKSGTASVVCLLNNFYPREAKVQWKVDNA |
| | LQSGNSQESVTEQDSKDSTYSLSSTLTLSKADYEKHKVYACEVTH |
| | QGLSSPVTKSFNRGEC (SEQ ID NO: 196) |
| Human kappa v2 | RTVAAPSVFIFPPSDEQLKSGTASVVCLLNNFYPREAKVQWKVDN |
| | ALQSGNSQESVTEQDSKDSTYSLSSTLTLSKADYEKHKVYACEVT |
| | HQGLSSPVTKSFNRGEC (SEQ ID NO: 197) |

[0606] In some embodiments, a human constant region comprises at least one or all of the following: a human CH1, human Hinge, human CH2, and CH3 domain. In some embodiments, the heavy chain constant region comprises an Fc region, where the Fc portion is a human IgG₁, IgG₂, IgG₃, IgG₄ or IgM isotype. The term “Fc region” refers to the C-terminal region of an immunoglobulin heavy chain which may be generated by papain digestion of an intact antibody. The Fc region of an immunoglobulin generally comprises two constant domains, a CH2 domain and a CH3 domain, and optionally comprises a CH4 domain. In certain embodiments, the Fc region is an Fc region from an IgG1, IgG2, IgG3, or IgG4 immunoglobulin. In some embodiments, the Fc region comprises CH2 and CH3 domains from a human IgG1 or human IgG2 immunoglobulin. The Fc region may retain effector function, such as C1q binding, complement-dependent cytotoxicity (CDC), Fc receptor binding, antibody-dependent cell-mediated cytotoxicity (ADCC), and phagocytosis. In other embodiments, the Fc region may be modified to reduce or eliminate effector function as described in further detail below.

[0607] In some embodiments, the antigen binding agents based on any heavy chain variable region or CDRs of a heavy chain variable region described herein includes a human heavy chain constant region, for example a human constant region comprising at least one or all of a human CH1, human Hinge, human CH2, and CH3 domain. In some embodiments, the antigen binding agents based on any heavy chain variable region or CDRs of a heavy chain variable region described herein includes an Fc region, where the Fc region is a human IgG₁, IgG₂, IgG₃, IgG₄ or IgM isotype. Examples of human IgG1, IgG2, and IgG4 heavy chain constant region sequences are shown below in TABLE EN2.

TABLE EN2
Exemplary Human Immunoglobulin Heavy Chain Constant Regions

| Ig isotype | Heavy Chain Constant Region Amino Acid Sequence |
|---|---|
| Human IgG1z | ASTKGPSVFPLAPSSKSTSGGTAALGCLVKDYFPEPVTVSWNSGALT |
| | SGVHTFPAVLQSSGLYSLSSVVTVPSSSLGTQTYICNVNHKPSNTKV |
| | DKKVEPKSCDKTHTCPPCPAPELLGGPSVFLFPPKPKDTLMISRTPEV |
| | TCVVVDVSHEDPEVKFNWYVDGVEVHNAKTKPREEQYNSTYRVV |
| | SVLTVLHQDWLNGKEYKCKVSNKALPAPIEKTISKAKGQPREPQVY |
| | TLPPSREEMTKNQVSLTCLVKGFYPSDIAVEWESNGQPENNYKTTP |
| | PVLDSDGSFFLYSKLTVDKSRWQQGNVFSCSVMHEALHNHYTQKS |
| | LSLSPGK (SESQ ID NO: 198) |
| Human IgG1za | ASTKGPSVFPLAPSSKSTSGGTAALGCLVKDYFPEPVTVSWNSGALT |
| | SGVHTFPAVLQSSGLYSLSSVVTVPSSSLGTQTYICNVNHKPSNTKV |
| | DKKVEPKSCDKTHTCPPCPAPELLGGPSVFLFPPKPKDTLMISRTPEV |
| | TCVVVDVSHEDPEVKFNWYVDGVEVHNAKTKPREEQYNSTYRVV |
| | SVLTVLHQDWLNGKEYKCKVSNKALPAPIEKTISKAKGQPREPQVY |
| | TLPPSRDELTKNQVSLTCLVKGFYPSDIAVEWESNGQPENNYKTTPP |
| | VLDSDGSFFLYSKLTVDKSRWQQGNVFSCSVMHEALHNHYTQKSL |
| | SLSPGK (SESQ ID NO: 199) |
| Human IgG1f | ASTKGPSVFPLAPSSKSTSGGTAALGCLVKDYFPEPVTVSWNSGALT |
| | SGVHTFPAVLQSSGLYSLSSVVTVPSSSLGTQTYICNVNHKPSNTKV |
| | DKRVEPKSCDKTHTCPPCPAPELLGGPSVFLFPPKPKDTLMISRTPEV |
| | TCVVVDVSHEDPEVKFNWYVDGVEVHNAKTKPREEQYNSTYRVV |
| | SVLTVLHQDWLNGKEYKCKVSNKALPAPIEKTISKAKGQPREPQVY |
| | TLPPSREEMTKNQVSLTCLVKGFYPSDIAVEWESNGQPENNYKTTP |
| | PVLDSDGSFFLYSKLTVDKSRWQQGNVFSCSVMHEALHNHYTQKS |
| | LSLSPGK (SESQ ID NO: 200) |
| Human IgG1fa | ASTKGPSVFPLAPSSKSTSGGTAALGCLVKDYFPEPVTVSWNSGALT |
| | SGVHTFPAVLQSSGLYSLSSVVTVPSSSLGTQTYICNVNHKPSNTKV |
| | DKRVEPKSCDKTHTCPPCPAPELLGGPSVFLFPPKPKDTLMISRTPEV |
| | TCVVVDVSHEDPEVKFNWYVDGVEVHNAKTKPREEQYNSTYRVV |
| | SVLTVLHQDWLNGKEYKCKVSNKALPAPIEKTISKAKGQPREPQVY |
| | TLPPSRDELTKNQVSLTCLVKGFYPSDIAVEWESNGQPENNYKTTPP |
| | VLDSDGSFFLYSKLTVDKSRWQQGNVFSCSVMHEALHNHYTQKSL |
| | SLSPGK (SESQ ID NO: 201) |
| Human IgG1z | ASTKGPSVFPLAPSSKSTSGGTAALGCLVKDYFPEPVTVSWNSGALT |
| aglycosylated | SGVHTFPAVLQSSGLYSLSSVVTVPSSSLGTQTYICNVNHKPSNTKV |
| v1 | DKKVEPKSCDKTHTCPPCPAPELLGGPSVFLFPPKPKDTLMISRTPEV |
| | TCVVVDVSHEDPEVKFNWYVDGVEVHNAKTKPREEQYGSTYRVV |
| | SVLTVLHQDWLNGKEYKCKVSNKALPAPIEKTISKAKGQPREPQVY |
| | TLPPSREEMTKNQVSLTCLVKGFYPSDIAVEWESNGQPENNYKTTP |
| | PVLDSDGSFFLYSKLTVDKSRWQQGNVFSCSVMHEALHNHYTQKS |
| | LSLSPGK (SESQ ID NO: 202) |
| Human IgG1z | ASTKGPSVFPLAPSSKSTSGGTAALGCLVKDYFPEPVTVSWNSGALT |
| aglycosylated v2 | SGVHTFPAVLQSSGLYSLSSVVTVPSSSLGTQTYICNVNHKPSNTKV |
| | DKKVEPKSCDKTHTCPPCPAPELLGGPSVFLFPPKPKDTLMISRTPEV |
| | TCVVVDVSHEDPEVKFNWYVDGVEVHNAKTKPCEEQYGSTYRCV |
| | SVLTVLHQDWLNGKEYKCKVSNKALPAPIEKTISKAKGQPREPQVY |
| | TLPPSREEMTKNQVSLTCLVKGFYPSDIAVEWESNGQPENNYKTTP |
| | PVLD SDGSFFLYSKLTVDKSRWQQGNVFSCSVMHEALHNHYTQKS |
| | LSLSPGK (SESQ ID NO: 203) |
| Human IgG2 | ASTKGPSVFPLAPCSRSTSESTAALGCLVKDYFPEPVTVSWNSGALT |
| | SGVHTFPAVLQSSGLYSLSSVVTVPSSNFGTQTYTCNVDHKPSNTK |
| | VDKTVERKCCVECPPCPAPPVAGPSVFLFPPKPKDTLMISRTPEVTC |
| | VVVDVSHEDPEVQFNWYVDGVEVHNAKTKPREEQFNSTFRVVSVL |
| | TVVHQDWLNGKEYKCKVSNKGLPAPIEKTISKTKGQPREPQVYTLP |
| | PSREEMTKNQVSLTCLVKGFYPSDIAVEWESNGQPENNYKTTPPML |
| | DSDGSFFLYSKLTVDKSRWQQGNVFSCSVMHEALHNHYTQKSLSL |
| | SPGK (SESQ ID NO: 204) |
| Human IgG4 | ASTKGPSVFPLAPSSKSTSGGTAALGCLVKDYFPEPVTVSWNSGALT |
| | SGVHTFPAVLQSSGLYSLSSVVTVPSSSLGTQTYICNVNHKPSNTKV |
| | DKKVEPKSCDKTHTCPPCPAPELLGGPSVFLFPPKPKDTLMISRTPEV |
| | TCVVVDVSHEDPEVKFNWYVDGVEVHNAKTKPCEEQYGSTYRCV |
| | SVLTVLHQDWLNGKEYKCKVSNKALPAPIEKTISKAKGQPREPQVY |
| | TLPPSREEMTKNQVSLTCLVKGFYPSDIAVEWESNGQPENNYKTTP |
| | PVLDSDGSFFLYSKLTVDKSRWQQGNVFSCSVMHEALHNHYTQKS |
| | LSLSPGK (SESQ ID NO: 205) |

[0608] In some embodiments, the heavy chain constant region, particularly the Fc region, is an engineered heavy chain constant region. In some embodiments, the antigen binding proteins, e.g. monoclonal antibodies, comprise one or more amino acid substitutions in the Fc region to enhance effector function, including ADCC activity, CDC activity, ADCP activity, and/or the clearance or half-life of the antigen binding protein. Exemplary amino acid substitutions (according to EU numbering scheme) that can enhance effector function include, but are not limited to, E233L, L234I, L234Y, L235S, G236A, S239D, F243L, F243V, P247I, D280H, K290S, K290E, K290N, K290Y, R292P, E294L, Y296W, S298A, S298D, S298V, S298G, S298T, T299A, Y300L, V3051, Q311M, K326A, K326E, K326W, A330S, A330L, A330M, A330F, I332E, D333A, E333S, E333A, K334A, K334V, A339D, A339Q, P396L, or combinations of any of the foregoing.

[0609] In some embodiments, the TREM2 antigen binding proteins (e.g. monoclonal antibodies) comprise one or more amino acid substitutions in a heavy chain constant region to reduce effector function. Exemplary amino acid substitutions (according to EU numbering scheme) that can reduce effector function include, but are not limited to, C220S, C226S, C229S, E233P, L234A, L234V, V234A, L234F, L235A, L235E, G237A, P238S, S267E, H268Q, N297A, N297G, N297Q, V309L, E318A, L328F, A330S, A331S, P331S or combinations of any of the foregoing.

[0610] In some embodiments, the TREM2 agonist antigen binding proteins comprise one or more amino acid substitutions that affect the level or type of glycosylation of the binding proteins. Glycosylation can contribute to the effector function of antibodies, particularly IgG1 antibodies. Glycosylation of polypeptides is typically either N-linked or O-linked. N-linked refers to the attachment of the carbohydrate moiety to the side chain of an asparagine residue. The tri-peptide sequences asparagine-X-serine and asparagine-X-threonine, where X is any amino acid except proline, are the recognition sequences for enzymatic attachment of the carbohydrate moiety to the asparagine side chain. Thus, the presence of either of these tri-peptide sequences in a polypeptide creates a potential glycosylation site. O-linked glycosylation refers to the attachment of one of the sugars N-acetylgalactosamine, galactose, or xylose, to a hydroxyamino acid, most commonly serine or threonine, although 5-hydroxyproline or 5-hydroxylysine may also be used.

[0611] In some embodiments, glycosylation of the TREM2 agonist antigen binding proteins described herein is increased by adding one or more glycosylation sites, e.g., to the Fc region of the binding protein. Addition of glycosylation sites to the antigen binding protein can be conveniently accomplished by altering the amino acid sequence such that it contains one or more of the above-described tri-peptide sequences (for N-linked glycosylation sites). The alteration may also be made by the addition of, or substitution by, one or more serine or threonine residues to the starting sequence (for O-linked glycosylation sites). For ease, the antigen binding protein amino acid sequence may be altered through changes at the DNA level, particularly by mutating the DNA encoding the target polypeptide at preselected bases such that codons are generated that will translate into the desired amino acids.

[0612] The invention also encompasses production of TREM2 antigen binding protein molecules with altered carbohydrate structure resulting in altered effector activity, including antigen binding proteins with absent or reduced fucosylation that exhibit improved ADCC activity. Various methods are known in the art to reduce or eliminate fucosylation. For example, ADCC effector activity is mediated by binding of the antibody molecule to the FcγRIII receptor, which has been shown to be dependent on the carbohydrate structure of the N-linked glycosylation at the N297 residue of the CH2 domain. Non-fucosylated antibodies bind this receptor with increased affinity and trigger FcγRIII-mediated effector functions more efficiently than native, fucosylated antibodies. For example, recombinant production of non-fucosylated antibody in CHO cells in which the alpha-1,6-fucosyl transferase enzyme has been knocked out results in antibody with 100-fold increased ADCC activity (see Yamane-Ohnuki et al., Biotechnol Bioeng. 87(5):614-22, 2004). Similar effects can be accomplished through decreasing the activity of alpha-1,6-fucosyl transferase enzyme or other enzymes in the fucosylation pathway, e.g., through siRNA or antisense RNA treatment, engineering cell lines to knockout the enzyme(s), or culturing with selective glycosylation inhibitors (see Rothman et al., Mol Immunol. 26(12):1113-23, 1989). Some host cell strains, e.g. Lec13 or rat hybridoma YB2/0 cell line naturally produce antibodies with lower fucosylation levels (see Shields et al., J Biol Chem. 277(30):26733-40, 2002 and Shinkawa et al., J Biol Chem. 278(5):3466-73, 2003). An increase in the level of bisected carbohydrate, e.g. through recombinantly producing antibody in cells that overexpress GnTIII enzyme, has also been determined to increase ADCC activity (see Umana et al., Nat Biotechnol. 17(2):176-80, 1999).

[0613] In other embodiments, glycosylation of the TREM2 agonist antigen binding proteins described herein is decreased or eliminated by removing one or more glycosylation sites, e.g., from the Fc region of the binding protein. In some embodiments, the TREM2 agonist antigen binding protein is an aglycosylated human monoclonal antibody, e.g. an aglycosylated human IgG1 monoclonal antibody. Amino acid substitutions that eliminate or alter N-linked glycosylation sites can reduce or eliminate N-linked glycosylation of the antigen binding protein. In certain embodiments, the TREM2 agonist antigen binding proteins described herein comprise a mutation at position N297 (according to EU numbering scheme), such as N297Q, N297A, or N297G. In some embodiments, the TREM2 agonist antigen binding proteins of the invention comprise an Fc region from a human IgG1 antibody with a mutation at position N297. In one particular embodiment, the TREM2 agonist antigen binding proteins of the invention comprise an Fc region from a human IgG1 antibody with a N297G mutation. For instance, in some embodiments, the TREM2 agonist antigen binding proteins of the invention comprise a heavy chain constant region comprising the sequence of SEQ ID NO:202.

[0614] To improve the stability of molecules comprising a N297 mutation, the Fc region of the TREM2 agonist antigen binding proteins may be further engineered. For instance, in some embodiments, one or more amino acids in the Fc region are substituted with cysteine to promote disulfide bond formation in the dimeric state. Residues corresponding to V259, A287, R292, V302, L306, V323, or I332 (according to EU numbering scheme) of an IgG1 Fc region may thus be substituted with cysteine. Preferably, specific pairs of residues are substituted with cysteine such that they preferentially form a disulfide bond with each other, thus limiting or preventing disulfide bond scrambling. Preferred pairs include, but are not limited to, A287C and L306C, V259C and L306C, R292C and V302C, and V323C and I332C. In certain embodiments, the TREM2 agonist antigen binding proteins described herein comprise an Fc region from a human IgG1 antibody with mutations R292C and V302C. In such embodiments, the Fc region may also comprise a N297 mutation, such as a N297G mutation. In some embodiments, the TREM2 agonist antigen binding proteins of the invention comprise a heavy chain constant region comprising the sequence of SEQ ID NO:203.

[0615] Modifications to the hinge region and/or CH1 domain of the heavy chain and/or the constant region of the light chain of the TREM2 agonist antigen binding proteins (e.g. monoclonal antibodies) of the invention can be made to reduce or eliminate disulfide heterogeneity. Structural hetereogeneity of IgG2 antibodies has been observed where the disulfide bonds in the hinge and CH1 regions of IgG2 antibodies can be shuffled to create different structural disulfide isoforms (IgG2A, IgG2B, and IgG2A-B), which can have different levels of activity. See, e.g., Dillon et al., J. Biol. Chem., Vol. 283: 16206-16215; Martinez et al., Biochemistry, Vol. 47: 7496-7508, 2008; and White et al., Cancer Cell, Vol. 27: 138-148, 2015. Amino acid substitutions can be made in the hinge region, CH1 domain, and/or light chain constant region to promote the formation of a single disulfide isoform or lock the antigen binding protein (e.g. monoclonal antibody) into a particular disulfide isoform (e.g. IgG2A or IgG2B). Such mutations are described in WO 2009/036209 and White et al., Cancer Cell, Vol. 27: 138-148, 2015, both of which are hereby incorporated by reference in its entirety, and include C131S, C219S, and C220S (according to EU numbering scheme) mutations in the heavy chain and a C214S (according to EU numbering scheme) mutation in the light chain. In certain embodiments, the TREM2 agonist antigen binding proteins of the invention are human IgG2 anti-TREM2 agonist antibodies. In some such embodiments, the TREM2 agonist antibodies comprise a C131S mutation (according to the EU numbering scheme) in their heavy chains. In other embodiments, the TREM2 agonist antibodies comprise a C214S mutation (according to the EU numbering scheme) in their light chains and a C220S mutation (according to the EU numbering scheme) in their heavy chains. In still other embodiments, the TREM2 agonist antibodies comprise a C214S mutation (according to the EU numbering scheme) in their light chains and a C219S mutation (according to the EU numbering scheme) in their heavy chains.

[0616] In other embodiments, the TREM2 agonist antigen binding proteins of the invention are anti-TREM2 agonist antibodies comprising a CH1 region and hinge region from a human IgG2 antibody and an Fc region from a human IgG1 antibody. The unique arrangement of the disulfide bonds in the hinge region of IgG2 antibodies has been reported to impart enhanced stimulatory activity for certain anticancer antibodies (White et al., Cancer Cell, Vol. 27: 138-148, 2015). This enhanced activity could be transferred to IgG1-type antibodies by exchanging the CH1 and hinge regions of the IgG1 antibody for those in the IgG2 antibody (White et al., 2015). The IgG2 hinge region includes the amino acid sequence ERKCCVECPPCP (SEQ ID NO:206). The amino acid sequence of the CH1 and hinge regions from a human IgG2 antibody may comprise the following amino acid sequence:

(SEQ ID NO: 207)
ASTKGPSVFP LAPCSRSTSE STAALGCLVK DYFPEPVTVS
WNSGALTSGV HTFPAVLQSS GLYSLSSVVT VPSSNFGTQT
YTCNVDHKPS NTKVDKTVER KCCVECPPCP.

[0617] In some embodiments, the antigen binding agents based on any heavy chain variable region or CThus, in some embodiments, the anti-TREM2 agonist antibodies comprise the sequence of SEQ ID NO:207 in combination with an Fc region from a human IgG1 antibody. In such embodiments, the anti-TREM2 antibodies can comprise one or more of the mutations described above to lock the anti-TREM2 antibodies into a particular disulfide isoform. For instance, in one embodiment, the anti-TREM2 antibody comprises a CH1 region and hinge region from a human IgG2 antibody and an Fc region from a human IgG1 antibody and comprises a C131S mutation (according to the EU numbering scheme) in its heavy chain. In another embodiment, the anti-TREM2 antibody comprises a CH1 region and hinge region from a human IgG2 antibody and an Fc region from a human IgG1 antibody and comprises a C214S mutation (according to the EU numbering scheme) in its light chain and a C220S mutation (according to the EU numbering scheme) in its heavy chain. In yet another embodiment, the anti-TREM2 antibody comprises a CH1 region and hinge region from a human IgG2 antibody and an Fc region from a human IgG1 antibody and comprises a C214S mutation (according to the EU numbering scheme) in its light chain and a C219S mutation (according to the EU numbering scheme) in its heavy chain.

[0618] In embodiments in which the anti-TREM2 antibodies comprise a CH1 region and hinge region from a human IgG2 antibody and an Fc region from a human IgG1 antibody, the anti-TREM2 antibodies may comprise any of the mutations in the Fc region described above to modulate the glycosylation of the antibodies. For instance, the human IgG1 Fc region of such anti-TREM2 antibodies may comprise a mutation at amino acid position N297 (according to the EU numbering scheme) in its heavy chain. In one particular embodiment, the N297 mutation is a N297G mutation. In certain embodiments, the Fc region may further comprise R292C and V302C mutations (according to the EU numbering scheme) in its heavy chain.

[0619] In certain embodiments, the anti-TREM2 antibodies of the invention comprise a CH1 region and hinge region from a human IgG2 antibody and an Fc region from a human IgG1 antibody, wherein the Fc region comprises the amino acid sequence of:

(SEQ ID NO: 281)
APELLGGPSVFLFPPKPKDTLMISRTPEVTCVVVDVSHEDPEVKFNWYVD
GVEVHNAKTKPREEQYGSTYRVVSVLTVLHQDWLNGKEYKCKVSNKALPA
PIEKTISKAKGQPREPQVYTLPPSREEMTKNQVSLTCLVKGFYPSDIAVE
WESNGQPENNYKTTPPVLDSDGSFFLYSKLTVDKSRWQQGNVFSCSVMHE
ALHNHYTQKSLSLSPGK.

[0620] In other embodiments, the anti-TREM2 antibodies of the invention comprise a CH1 region and hinge region from a human IgG2 antibody and an Fc region from a human IgG1 antibody, wherein the Fc region comprises the amino acid sequence of:

(SEQ ID NO: 282)
APELLGGPSVFLFPPKPKDTLMISRTPEVTCVVVDVSHEDPEVKFNWYVD
GVEVHNAKTKPCEEQYGSTYRCVSVLTVLHQDWLNGKEYKCKVSNKALPA
PIEKTISKAKGQPREPQVYTLPPSREEMTKNQVSLTCLVKGFYPSDIAVE
WESNGQPENNYKTTPPVLDSDGSFFLYSKLTVDKSRWQQGNVFSCSVMHE
ALHNHYTQKSLSLSPGK.

[0621] Modifications of the TREM2 agonist antigen binding proteins of the invention to increase serum half-life also may desirable, for example, by incorporation of or addition of a salvage receptor binding epitope (e.g., by mutation of the appropriate region or by incorporating the epitope into a peptide tag that is then fused to the antigen binding protein at either end or in the middle, e.g., by DNA or peptide synthesis; see, e.g., WO96/32478) or adding molecules such as PEG or other water soluble polymers, including polysaccharide polymers. The salvage receptor binding epitope preferably constitutes a region wherein any one or more amino acid residues from one or two loops of an Fc region are transferred to an analogous position in the antigen binding protein. Even more preferably, three or more residues from one or two loops of the Fc region are transferred. Still more preferred, the epitope is taken from the CH2 domain of the Fc region (e.g., an IgG Fc region) and transferred to the CH1, CH3, or VH region, or more than one such region, of the antigen binding protein. Alternatively, the epitope is taken from the CH2 domain of the Fc region and transferred to the CL region or VL region, or both, of the antigen binding protein. See International applications WO 97/34631 and WO 96/32478 for a description of Fc variants and their interaction with the salvage receptor.

[0622] Antibody Fragments

[0623] In some embodiments, the antigen binding agent can be a fragment of the antibody of the present disclosure, including portions of a full length antibody, and includes the antigen binding or variable region. Exemplary antibody fragments include Fab, Fab′, F(ab′)₂ and Fv fragments. In some embodiments, proteolytic digestion with papain produces two identical antigen binding fragments, the Fab′ fragment, each with a single antigen binding site. In some embodiments, proteolytic digestion with pepsin yields an F(ab′)₂ fragment that has two antigen binding fragments which are capable of cross-linking antigen, and a residual pFc′ fragment. In some embodiments, antibody fragments are produced directly in recombinant host-cells, for example host cells that that have a polynucleotide encoding an antigen binding agent described herein. For example, Fab, Fv and scFv antibody fragments can all be expressed in and secreted from E. coli, thus allowing the straightforward production of large amounts of these fragments. Anti-TREM2 antibody fragments can also be isolated from the antibody phage libraries as discussed above. Alternatively, Fab′-SH fragments can be directly recovered from E. coli and chemically coupled to form F(ab′)2 fragments (Carter et al., Bio/Technology 10:163-167 (1992)). According to another approach, F(ab′)2 fragments can be isolated directly from recombinant host-cell culture. Production of Fab and F(ab′)2 antibody fragments with increased in vivo half-lives are described in U.S. Pat. No. 5,869,046. In other embodiments, the antibody of choice is a single chain Fv fragment (scFv). See WO 93/16185; U.S. Pat. Nos. 5,571,894 and 5,587,458. Accordingly, other types of fragments can include diabodies, linear antibodies, single-chain antibodies, and multispecific antibodies formed from antibody fragments. In some embodiments, the antibody fragments are functional in that they retain the desired antigen binding properties, e.g., specific binding to TREM2, activation of TREM2 activities, and the like as described herein.

[0624] Bispecific Antibodies

[0625] In some embodiments, the TREM2 binding protein is a bispecific antibody that binds to a TREM2 protein of the present disclosure and a second antigen. In some embodiments, bispecific antibodies of the present disclosure bind to one or more amino acid residues of human TREM2 (SEQ ID NO:1), or amino acid residues on a TREM2 protein corresponding to amino acid residues of SEQ ID NO:1. In some embodiments, any of the TREM2 binding proteins described herein can be used to prepare the bispecific antibody.

[0626] In some embodiments, bispecific antibodies of the present disclosure recognize a first antigen and a second antigen. In some embodiments, the first antigen is human TREM2 or a naturally occurring variant thereof. In some embodiments, the second antigen is DAP12, or other proteins or ligand that interact with TREM2. In some embodiments, the second antigen is (a) an antigen facilitating transport across the blood-brain-barrier; (b) an antigen facilitating transport across the blood-brain-barrier, for example transferrin receptor (TR), insulin receptor (HIR), insulin-like growth factor receptor (IGFR), low-density lipoprotein receptor related proteins 1 and 2 (LPR-1 and 2), diphtheria toxin receptor, CRM 197, a llama single domain antibody, TMEM 30(A), a protein transduction domain, TAT, Syn-B, penetratin, a poly-arginine peptide, an angiopep peptide, and ANG1005; (c) a disease-causing protein selected from amyloid beta, oligomeric amyloid beta, amyloid beta plaques, amyloid precursor protein or fragments thereof, Tau, IAPP, alpha-synuclein, TDP-43, FUS protein, C9orf72 (chromosome 9 open reading frame 72), c9RAN protein, prion protein, PrPSc, huntingtin, calcitonin, superoxide dismutase, ataxin, ataxin 1, ataxin 2, ataxin 3, ataxin 7, ataxin 8, ataxin 10, Lewy body, atrial natriuretic factor, islet amyloid polypeptide, insulin, apolipoprotein AI, serum amyloid A, medin, prolactin, transthyretin, lysozyme, beta 2 microglobulin, gelsolin, keratoepithelin, cystatin, immunoglobulin light chain AL, S-IBM protein, Repeat-associated non-ATG (RAN) translation products, DiPeptide repeat (DPR) peptides, glycine-alanine (GA) repeat peptides, glycine-proline (GP) repeat peptides, glycine-arginine (GR) repeat peptides, proline-alanine (PA) repeat peptides, ubiquitin, and proline-arginine (PR) repeat peptides; and (d) ligands and/or proteins expressed on immune cells, wherein the ligands and/or proteins selected from CD40, OX40, ICOS, CD28, CD137/4-1BB, CD27, GITR, PD-L1, CTLA-4, PD-L2, PD-1, B7-H3, B7-H4, HVEM, BTLA, KIR, GAL9, TIM3, A2AR, LAG-3, and phosphatidylserine; and (e) a protein, lipid, polysaccharide, or glycolipid expressed on one or more tumor cells and any combination thereof.

[0627] Methods for making bispecific antibodies are known in the art. Traditional production of full-length bispecific antibodies is based on the coexpression of two immunoglobulin heavy-chain/light chain pairs, where the two chains have different specificities. Millstein et al., Nature, 305:537-539 (1983). Because of the random assortment of immunoglobulin heavy and light chains, these hybridomas (quadromas) produce a potential mixture of 10 different antibody molecules, of which only one has the correct bispecific structure. Purification of the correct molecule, which is usually done by affinity chromatography steps, is rather cumbersome, and the product yields are low. Similar procedures are disclosed in WO 93/08829 and in Traunecker et al., EMBO J., 10:3655-3659 (1991).

[0628] In some embodiments, antibody variable domains with the desired binding specificities (antibody-antigen combining sites) are fused to immunoglobulin constant domain sequences. The fusion preferably is with an immunoglobulin heavy chain constant domain, comprising at least part of the hinge, CH2, and CH3 regions. It is preferred to have the first heavy-chain constant region (CHI) containing the site necessary for light chain binding, present in at least one of the fusions. DNAs encoding the immunoglobulin heavy chain fusions and, if desired, the immunoglobulin light chain, are inserted into separate expression vectors, and are co-transfected into a suitable host organism. This provides for great flexibility in adjusting the mutual proportions of the three polypeptide fragments in embodiments when unequal ratios of the three polypeptide chains used in the construction provide the optimum yields. It is, however, possible to insert the coding sequences for two or all three polypeptide chains in one expression vector when the expression of at least two polypeptide chains in equal ratios results in high yields or when the ratios are of no particular significance.

[0629] In some embodiments, the bispecific antibodies are composed of a hybrid immunoglobulin heavy chain with a first binding specificity in one arm, and a hybrid immunoglobulin heavy chain-light chain pair (providing a second binding specificity) in the other arm. It was found that this asymmetric structure facilitates the separation of the desired bispecific compound from unwanted immunoglobulin chain combinations, as the presence of an immunoglobulin light chain in only half of the bispecific molecules provides for an easy way of separation. This approach is disclosed in WO 94/04690. For further details of generating bispecific antibodies, see, for example, Suresh et al., Methods in Enzymology 121: 210 (1986); and Garber, Nature Reviews Drug Discovery 13, 799-801 (2014).

[0630] In some embodiments, the bispecific antibody can be prepared as described in WO 96/27011 or U.S. Pat. No. 5,731,168. In these embodiments, the interface between a pair of antibody molecules can be engineered to maximize the percentage of heterodimers which are recovered from recombinant-cell culture. The preferred interface comprises at least a part of the CH3 region of an antibody constant domain. In this method, one or more small amino acid side chains from the interface of the first antibody molecule are replaced with larger side chains (e.g., tyrosine or tryptophan). Compensatory “cavities” of identical or similar size to the large side chains(s) are created on the interface of the second antibody molecule by replacing large amino acid side chains with smaller ones (e.g., alanine or threonine). This provides a mechanism for increasing the yield of the heterodimer over other unwanted end-products such as homodimers.

[0631] In some embodiments, bispecific antibody can be prepared Techniques for generating bispecific antibodies from antibody fragments have been described in for example, Brennan et al., Science, 1985, 229:81, which describe proteolytic cleavage of intact antibodies to generate F(ab′)2 fragments, which are then reduced in the presence of the dithiol complexing agent sodium arsenite to stabilize vicinal dithiols and prevent intermolecular disulfide formation. The Fab′ fragments generated are then converted to thionitrobenzoate (TNB) derivatives. One of the Fab′-TNB derivatives is then reconverted to the Fab′-TNB derivative to form the bispecific antibody. The bispecific antibodies produced can be used as agents for the selective immobilization of enzyme.

[0632] Various techniques for making and isolating bivalent antibody fragments directly from recombinant-cell culture have also been described. For example, bivalent heterodimers have been produced using leucine zippers. Kostelny et al., Immunol., 1992, 148(5):1547-1553. The “diabody” technology described by Hollinger et al., Proc. Nat'l Acad. Sci. USA, 1993, 90: 6444-6448, provides an alternative mechanism for making bispecific/bivalent antibody fragments. The fragments comprise a heavy-chain variable domain (VH) connected to a light-chain variable domain (VL) by a linker which is too short to allow pairing between the two domains on the same chain. Accordingly, the VH and VL domains of one fragment are forced to pair with the complementary VL and VH domains of another fragment, thereby forming two antigen-binding sites. Another strategy for making bispecific/bivalent antibody fragments by the use of single-chain Fv (sFv) dimers (see, e.g., Gruber et al., Immunol, 152:5368 (1994).

[0633] Single Chain Antibodies

[0634] In some embodiments, the TREM2 binding protein is a single chain antibody, e.g., single chain Fv (sFv or scFv) antibodies, in which a variable heavy and a variable light chain are joined together (directly or through a peptide linker) to form a continuous polypeptide. A single-chain Fv” or “sFv” antibody fragments comprise the VH and VL domains of an antibody, where these domains are present in a single polypeptide chain. Generally, the Fv polypeptide further comprises a polypeptide linker between the VH and VL domains which enables the sFv to form the desired structure for antigen binding. For a review of sFv, see Pluckthun in The Pharmacology of Monoclonal Antibodies, Vol. 113, pp. 269-315, Rosenburg and Moore, eds., Springer-Verlag, New York (1994). Any of the TREM2 binding agents described herein can be used to prepare a single chain antibody.

[0635] In some embodiments, single chain antibody can be prepared by phage display methods, where the antigen binding domain is expressed as a single polypeptide and screened for specific binding activity. Alternatively, the single chain antibody can be prepared by cloning the heavy and light chains from a cell, typically a hybridoma cell line expressing a desired antibody. Generally, a linker peptide, typically from 10 to 25 amino acids in length is used to link the heavy and light chains. The linker can be glycine, serine, and/or threonine rich to impart flexibility and solubility to the single chain antibody. Specific methods for generating single chain antibodies are described in, for example, Loffler et al., 2000, Blood 95(6):2098-103; Worn and Pluckthun, 2001, J Mol Biol. 305, 989-1010; Pluckthun, In The Pharmacology of Monoclonal Antibodies, Vol. 113, pp. 269-315, Rosenburg and Moore, eds., Springer-Verlag, New York (1994); U.S. Pat. Nos. 5,840,301; 5,844,093; and 5,892,020; all of which are incorporated herein by reference.

[0636] Multivalent Antibodies

[0637] In some embodiments, the anti-TREM2 antibody is a multivalent antibody, which may be internalized (and/or catabolized) faster than a bivalent antibody by a cell expressing an antigen to which the antibodies bind. In some embodiments, the anti-TREM2 antibodies of the present disclosure or antibody fragments thereof can be multivalent antibodies (which are other than of the IgM class) with three or more antigen binding sites (e.g., tetravalent antibodies), which can be readily produced by recombinant expression of nucleic acid encoding the polypeptide chains of the antibody. The multivalent antibody can comprise a dimerization domain and three or more antigen binding sites. A preferred dimerization domain comprises an Fc region or a hinge region. In this scenario, the antibody will comprise an Fc region and three or more antigen binding sites amino-terminal to the Fc region. The preferred multivalent antibody herein contains three to about eight, but preferably four, antigen binding sites. The multivalent antibody contains at least one polypeptide chain (and preferably two polypeptide chains), wherein the polypeptide chain or chains comprise two or more variable domains. For instance, the polypeptide chain or chains may comprise VD1-(X1)n-VD2-(X2)n-Fc, wherein VD1 is a first variable domain, VD2 is a second variable domain, Fc is one polypeptide chain of an Fc region, XI and X2 represent an amino acid or polypeptide, and n is 0 or 1. Similarly, the polypeptide chain or chains may comprise VH-CH1-flexible linker-VH-CH1-Fc region chain; or VH-CH1-VH-CH1-FC region chain. The multivalent antibody herein preferably further comprises at least two (and preferably four) light chain variable domain polypeptides. The multivalent antibody herein may, for instance, comprise from about two to about eight light chain variable domain polypeptides. The light chain variable domain polypeptides contemplated here comprise a light chain variable domain and, optionally, further comprise a CL domain.

[0638] Multivalent antibodies may recognize the TREM2 antigen as well as without limitation additional antigens A beta peptide, antigen or an alpha synuclein protein antigen or, Tau protein antigen or, TDP-43 protein antigen or, prion protein antigen or, huntingtin protein antigen, or RAN, translation Products antigen, including the DiPeptide Repeats, (DPRs peptides) composed of glycine-alanine (GA), glycine-proline (GP), glycine-arginine (GR), proline-alanine (PA), or proline-arginine (PR), Insulin receptor, insulin like growth factor receptor. Transferrin receptor or any other antigen that facilitate antibody transfer across the blood brain barrier.

[0639] Polynucleotides Encoding TREM2 Antibodies

[0640] In another aspect, the present disclosure provides polynucleotides encoding the antibodies or antigen binding regions of the described herein. In particular, the polynucleotides are isolated polynucleotides. The polynucleotides may be operatively linked to one or more heterologous control sequences that control gene expression to create a recombinant polynucleotide capable of expressing the polypeptide of interest. Expression constructs containing a heterologous polynucleotide encoding the relevant polypeptide or protein can be introduced into appropriate host cells to express the corresponding polypeptide.

[0641] As will be appreciated by those in the art, due to the degeneracy of the genetic code, where the same amino acids are encoded by alternative or synonymous codons, an extremely large number of nucleic acids can be made, all of which encode the CDRs, variable regions, and heavy and light chains or other components of the antigen binding proteins described herein. Thus, having identified a particular amino acid sequence, those skilled in the art could make any number of different nucleic acids, by simply modifying the sequence of one or more codons in a way which does not change the amino acid sequence of the encoded protein. In this regard, the present disclosure includes each and every possible variation of polynucleotides that encode the polypeptides disclosed herein.

[0642] An “isolated nucleic acid,” which is used interchangeably herein with “isolated polynucleotide,” is a nucleic acid that has been separated from adjacent genetic sequences present in the genome of the organism from which the nucleic acid was isolated, in the case of nucleic acids isolated from naturally-occurring sources. In the case of nucleic acids synthesized enzymatically from a template or chemically, such as PCR products, cDNA molecules, or oligonucleotides for example, it is understood that the nucleic acids resulting from such processes are isolated nucleic acids. An isolated nucleic acid molecule refers to a nucleic acid molecule in the form of a separate fragment or as a component of a larger nucleic acid construct. In one preferred embodiment, the nucleic acids are substantially free from contaminating endogenous material.

[0643] In some embodiments, the polynucleotide encodes a CDR L1, CDR L2 and CDR L3 of a light chain variable region described herein. In some embodiments, the polynucleotide encodes a CDR H1, CDR H2 and CDR H3 of a heavy chain variable region described herein.

[0644] In some embodiments, the polynucleotide encodes a CDR L1, CDR L2 and CDR L3 of a light chain variable region and a CDR H1, CDR H2 and CDR H3 of a heavy chain variable region described herein.

[0645] In some embodiments, the polynucleotide encodes a light chain variable region VL having at least 80%, 85%, 90%, 91%, 92%, 93%, 94%, 95%, 96%, 97%, 98%, 99% or greater sequence identity to the amino acid sequence of a variable light chain disclosed herein.

[0646] In some embodiments, the polynucleotide encodes a heavy chain variable region VH having at least 80%, 85%, 90%, 91%, 92%, 93%, 94%, 95%, 96%, 97%, 98%, 99% or greater sequence identity to the amino acid sequence of a variable heavy chain disclosed herein.

[0647] In some embodiments, the polynucleotides herein may be manipulated in a variety of ways to provide for expression of the encoded polypeptide. In some embodiments, the polynucleotide is operably linked to control sequences, including among others, transcription promoters, leader sequences, transcription enhancers, ribosome binding or entry sites, termination sequences, and polyadenylation sequences for expression of the polynucleotide and/or corresponding polypeptide. Manipulation of the isolated polynucleotide prior to its insertion into a vector may be desirable or necessary depending on the expression vector. The techniques for modifying polynucleotides and nucleic acid sequences utilizing recombinant DNA methods are well known in the art. Guidance is provided in Sambrook et al., Molecular Cloning: A Laboratory Manual, 3rd Ed., Cold Spring Harbor Laboratory Press (2001); and Current Protocols in Molecular Biology, Ausubel. F. ed., Greene Pub. Associates (1998), updates to 2013.

[0648] In some embodiments, variants of the antigen binding proteins, including the variants described herein, can be prepared by site-specific mutagenesis of nucleotides in the DNA encoding the polypeptide, using cassette or PCR mutagenesis or other techniques well known in the art, to produce DNA encoding the variant, and thereafter expressing the recombinant DNA in cell culture as outlined herein. However, antigen binding proteins comprising variant CDRS having up to about 100-150 residues may be prepared by in vitro synthesis using established techniques. The variants typically exhibit the same qualitative biological activity as the naturally occurring analogue, e.g., binding to antigen. Such variants include, for example, deletions and/or insertions and/or substitutions of residues within the amino acid sequences of the antigen binding proteins. Any combination of deletion, insertion, and substitution is made to arrive at the final construct, provided that the final construct possesses the desired characteristics. The amino acid changes also may alter post-translational processes of the antigen binding protein, such as changing the number or position of glycosylation sites. In some embodiments, antigen binding protein variants are prepared with the intent to modify those amino acid residues which are directly involved in epitope binding. In other embodiments, modification of residues which are not directly involved in epitope binding or residues not involved in epitope binding in any way, is desirable, for purposes discussed herein. Mutagenesis within any of the CDR regions, framework regions, and/or constant regions is contemplated. Covariance analysis techniques can be employed by the skilled artisan to design useful modifications in the amino acid sequence of the antigen binding protein. See, e.g., Choulier, et al., Proteins 41:475-484, 2000; Demarest et al., J. Mol. Biol., 2004, 335:41-48; Hugo et al., Protein Engineering, 2003, 16(5):381-86; Aurora et al., US Patent Publication No. 2008/0318207 A1; Glaser et al., US Patent Publication No. 2009/0048122 A1; Urech et al., WO 2008/110348 A1; Borras et al., WO 2009/000099 A2. Such modifications determined by covariance analysis can improve potency, pharmacokinetic, pharmacodynamic, and/or manufacturability characteristics of an antigen binding protein.

[0649] In another aspect, the present invention also provides vectors comprising one or more nucleic acids or polynucleotides encoding one or more components of the antigen binding proteins describe herein (e.g. variable regions, light chains, and heavy chains). As used herein, the term “vector” refers to any molecule or entity (e.g., nucleic acid, plasmid, bacteriophage or virus) used to transfer protein coding information into a host cell. Examples of vectors include, but are not limited to, plasmids, viral vectors, non-episomal mammalian vectors and expression vectors, for example, recombinant expression vectors. The term “expression vector” or “expression construct” as used herein refers to a recombinant DNA molecule containing a desired coding sequence and appropriate nucleic acid control sequences necessary for the expression of the operably linked coding sequence in a particular host cell. An expression vector can include, but is not limited to, sequences that affect or control transcription, translation, and, if introns are present, affect RNA splicing of a coding region operably linked thereto. Nucleic acid sequences necessary for expression in prokaryotes include a promoter, optionally an operator sequence, a ribosome binding site and possibly other sequences. Eukaryotic cells are known to utilize promoters, enhancers, and termination and polyadenylation signals. A secretory signal peptide sequence can also, optionally, be encoded by the expression vector, operably linked to the coding sequence of interest, so that the expressed polypeptide can be secreted by the recombinant host cell, for more facile isolation of the polypeptide of interest from the cell, if desired.

[0650] The recombinant expression vector may be any vector (e.g., a plasmid or virus), which can be conveniently subjected to recombinant DNA procedures and can bring about the expression of the polynucleotide sequence. The choice of the vector will typically depend on the compatibility of the vector with the host cell into which the vector is to be introduced. The vectors may be linear or closed circular plasmids. Exemplary expression vectors include, among others, vectors based on T7 or T7lac promoters (pACY: Novagen; pET); vectors based on Baculovirus promoters (e.g., pBAC); vectors based on Ef1-α and HTLV promoters (e.g., pFUSE2; Invitrogen, CA, USA); vectors based on CMV enhancer and human ferritin light chain gene promoters (e.g., pFUSE: Invitrogen, CA, USA); vectors based on CMV promoters (e.g, pFLAG: Sigma, USA); and vectors based on dihydrofolate reductase promoters (e.g., pEASE: Amgen, USA). Various vectors can be used for transient or stable expression of the polypeptides of interest.

[0651] Host Cells

[0652] In another aspect, the polynucleotide encoding the antigen binding proteins described herein (e.g. variable regions, light chains, and heavy chains) is operatively linked to one or more control sequences for expression of the polypeptide in the host cell. Accordingly, in a further aspect, the present disclosure provides a host cell comprising one or more expression vectors encoding the components of the TREM2 agonist antigen binding proteins described herein.

[0653] Exemplary host cells include prokaryote, yeast, or higher eukaryote cells. Prokaryotic host cells include eubacteria, such as Gram-negative or Gram-positive organisms, for example, Enterobacteriaceae such as Escherichia, e.g., E. coli, Enterobacter, Erwinia, Klebsiella, Proteus, Salmonella, e.g., Salmonella typhimurium, Serratia, e.g., Serratia marcescans, and Shigella, as well as Bacillus, such as B. subtilis and B. licheniformis, Pseudomonas, and Streptomyces. Eukaryotic microbes such as filamentous fungi or yeast are suitable cloning or expression hosts for recombinant polypeptides. Saccharomyces cerevisiae, or common baker's yeast, is the most commonly used among lower eukaryotic host microorganisms. However, a number of other genera, species, and strains are commonly available and useful herein, such as Pichia, e.g. P. pastoris, Schizosaccharomyces pombe; Kluyveromyces, Yarrowia; Candida; Trichoderma reesia; Neurospora crassa; Schwanniomyces, such as Schwanniomyces occidentalis; and filamentous fungi, such as, e.g., Neurospora, Penicillium, Tolypocladium, and Aspergillus hosts such as A. nidulans and A. niger.

[0654] Host cells for the expression of glycosylated antigen binding proteins can be derived from multicellular organisms. Examples of invertebrate cells include plant and insect cells. Numerous baculoviral strains and variants and corresponding permissive insect host cells from hosts such as Spodoptera frugiperda (caterpillar), Aedes aegypti (mosquito), Aedes albopictus (mosquito), Drosophila melanogaster (fruitfly), and Bombyx mori have been identified. A variety of viral strains for transfection of such cells are publicly available, e.g., the L-1 variant of Autographa californica NPV and the Bm-5 strain of Bombyx mori NPV.

[0655] Vertebrate host cells are also suitable hosts, and recombinant production of antigen binding proteins from such cells has become routine procedure. Mammalian cell lines available as hosts for expression are well known in the art and include, but are not limited to, immortalized cell lines available from the American Type Culture Collection (ATCC), including but not limited to Chinese hamster ovary (CHO) cells, including CHOK1 cells (ATCC CCL61), DXB-11, DG-44, and Chinese hamster ovary cells/-DHFR (CHO, Urlaub et al., Proc. Natl. Acad. Sci. USA, 1980, 77: 4216); monkey kidney CV1 line transformed by SV40 (COS-7, ATCC CRL 1651); human embryonic kidney line (293 or 293 cells subcloned for growth in suspension culture, (Graham et al., J. Gen Virol. 36: 59, 1977); baby hamster kidney cells (BHK, ATCC CCL 10); mouse sertoli cells (TM4, Mather, Biol. Reprod., 1980, 23:243-251); monkey kidney cells (CV1 ATCC CCL 70); African green monkey kidney cells (VERO-76, ATCC CRL-1587); human cervical carcinoma cells (HELA, ATCC CCL 2); canine kidney cells (MDCK, ATCC CCL 34); buffalo rat liver cells (BRL 3A, ATCC CRL 1442); human lung cells (W138, ATCC CCL 75); human hepatoma cells (Hep G2, HB 8065); mouse mammary tumor (MMT 060562, ATCC CCL51); TRI cells (Mather et al., Annals N.Y Acad. Sci., 1982, 383:44-68); MRC 5 cells or FS4 cells; mammalian myeloma cells, and a number of other cell lines. In certain embodiments, cell lines may be selected through determining which cell lines have high expression levels and constitutively produce antigen binding proteins with human TREM2 binding properties. In another embodiment, a cell line from the B cell lineage that does not make its own antibody but has a capacity to make and secrete a heterologous antibody can be selected. CHO cells are preferred host cells in some embodiments for expressing the TREM2 agonist antigen binding proteins of the invention.

[0656] In various embodiments, introduction and transformation of a host cell with a polynucleotide of the present disclosure, such as an expression vector for expressing an antigen binding protein, is accomplished by methods that including transfection, infection, calcium phosphate co-precipitation, electroporation, microinjection, lipofection, DEAE-dextran mediated transfection, or other known techniques. In some embodiments, the method selected can be guided by the type of host cell used. Suitable methods are described in, for example, Sambrook et al., 2001.

[0657] Expression and Isolation

[0658] In some embodiments, the host cell comprising a polynucleotide encoding one or more components of the antigen binding proteins described herein (e.g. variable regions, light chains, and heavy chains) is used to express the antigen binding protein of interest. In some embodiments, a method for expressing the antigen binding protein comprises culturing the host cell in suitable media and conditions appropriate for expression of the protein of interest.

[0659] The type of media and culture conditions selected is based on the type of host cell. In some embodiments, exemplary media for mammalian host cells include, by way of example and not limitation, Ham's F10 (Sigma), Minimal Essential Medium (MEM, Sigma), RPMI-1640 (Sigma), and Dulbecco's Modified Eagle's Medium (DMEM, Sigma. In some embodiments, the media can be supplemented as necessary with hormones and/or other growth factors (such as insulin, transferrin, or epidermal growth factor), salts (such as sodium chloride, calcium, magnesium, and phosphate), buffers (such as HEPES), nucleotides (such as adenosine and thymidine), antibiotics (such as Gentamycin™ drug), trace elements (defined as inorganic compounds usually present at final concentrations in the micromolar range), and glucose or an equivalent energy source. In some embodiments, culture conditions, such as temperature, pH, % CO₂, and the like, can use conditions available and known to the skilled artisan.

[0660] In some embodiments, the expressed antigen binding protein is isolate and/or purified from the host cell. In some embodiments in which the expressed protein in present in the media, the media containing the expressed protein is subject to isolation procedures. In some embodiments in which the antigen binding protein is produced intracellularly, the cells are subject to disruption, and as a first step, the particulate debris, either host cells or lysed fragments, is removed, for example, by centrifugation or ultrafiltration. Subsequently, the antigen binding protein can be isolated and further purified by various known techniques. Such isolation techniques include affinity chromatography with Protein-A Sepharose, size-exclusion chromatography, ion-exchange chromatography, high performance liquid chromatography, differential solubility, and the like (see, e.g., Fisher, Laboratory Techniques, In Biochemistry And Molecular Biology, Work and Burdon, eds., Elsevier (1980); Antibodies: A Laboratory Manual, Greenfield, E. A., ed., Cold Spring Harbor Laboratory Press, New York (2012); Coligan, et al., supra, sections 2.7.1-2.7.12 and sections 2.9.1-2.9.3; Barnes, et al., Purification of Immunoglobulin G (IgG), in Methods Mol. Biol., Vol. 10, pages 79-104, Humana Press (1992)).

[0661] In some embodiments, the isolated antibody can be further purified as measurable by: (1) weight of protein as determined using the Lowry method; (2) to a degree sufficient to obtain at least 15 residues of N-terminal or internal amino acid sequence by use of a spinning-cup sequencer; or (3) to homogeneity by SDS-PAGE under reducing or non-reducing conditions using Coomassie blue or, preferably, silver stain. The purified antibody can be 85% or greater, 90% or greater, 95% or greater, or at least 99% by weight as determined by the foregoing methods.

[0662] Antibody Formulations

[0663] In certain embodiments, the invention provides a composition (e.g. a pharmaceutical composition) comprising one or a plurality of the TREM2 activating antibodies and TREM2 agonist antibodies and antigen binding proteins disclosed herein together with pharmaceutically acceptable diluents, carriers, excipients, solubilizers, emulsifiers, preservatives, and/or adjuvants. Pharmaceutical compositions of the invention include, but are not limited to, liquid, frozen, and lyophilized compositions. “Pharmaceutically-acceptable” refers to molecules, compounds, and compositions that are non-toxic to human recipients at the dosages and concentrations employed and/or do not produce allergic or adverse reactions when administered to humans. In some embodiments, the pharmaceutical composition may contain formulation materials for modifying, maintaining or preserving, for example, the pH, osmolarity, viscosity, clarity, color, isotonicity, odor, sterility, stability, rate of dissolution or release, adsorption or penetration of the composition. In such embodiments, suitable formulation materials include, but are not limited to, amino acids (such as glycine, glutamine, asparagine, arginine or lysine); antimicrobials; antioxidants (such as ascorbic acid, sodium sulfite or sodium hydrogen-sulfite); buffers (such as borate, bicarbonate, Tris-HCl, citrates, phosphates or other organic acids); bulking agents (such as mannitol or glycine); chelating agents (such as ethylenediamine tetraacetic acid (EDTA)); complexing agents (such as caffeine, polyvinylpyrrolidone, beta-cyclodextrin or hydroxypropyl-beta-cyclodextrin); fillers; monosaccharides; disaccharides; and other carbohydrates (such as glucose, mannose or dextrins); proteins (such as serum albumin, gelatin or immunoglobulins); coloring, flavoring and diluting agents; emulsifying agents; hydrophilic polymers (such as polyvinylpyrrolidone); low molecular weight polypeptides; salt-forming counterions (such as sodium); preservatives (such as benzalkonium chloride, benzoic acid, salicylic acid, thimerosal, phenethyl alcohol, methylparaben, propylparaben, chlorhexidine, sorbic acid or hydrogen peroxide); solvents (such as glycerin, propylene glycol or polyethylene glycol); sugar alcohols (such as mannitol or sorbitol); suspending agents; surfactants or wetting agents (such as pluronics, PEG, sorbitan esters, polysorbates such as polysorbate 20, polysorbate 80, triton, tromethamine, lecithin, cholesterol, tyloxapal); stability enhancing agents (such as sucrose or sorbitol); tonicity enhancing agents (such as alkali metal halides, preferably sodium or potassium chloride, mannitol sorbitol); delivery vehicles; diluents; excipients and/or pharmaceutical adjuvants. Methods and suitable materials for formulating molecules for therapeutic use are known in the pharmaceutical arts, and are described, for example, in Remington's Pharmaceutical Sciences, 18th Ed., (A.R. Genrmo, ed.), 1990, Mack Publishing Company.

[0664] In some embodiments, the pharmaceutical composition of the invention comprises a standard pharmaceutical carrier, such as a sterile phosphate buffered saline solution, bacteriostatic water, and the like. A variety of aqueous carriers may be used, e.g., water, buffered water, 0.4% saline, 0.3% glycine and the like, and may include other proteins for enhanced stability, such as albumin, lipoprotein, globulin, etc., subjected to mild chemical modifications or the like.

[0665] Exemplary concentrations of the antigen binding proteins in the formulation may range from about 0.1 mg/ml to about 200 mg/ml or from about 0.1 mg/mL to about 50 mg/mL, or from about 0.5 mg/mL to about 25 mg/mL, or alternatively from about 2 mg/mL to about 10 mg/mL. An aqueous formulation of the antigen binding protein may be prepared in a pH-buffered solution, for example, at pH ranging from about 4.5 to about 6.5, or from about 4.8 to about 5.5, or alternatively about 5.0. Examples of buffers that are suitable for a pH within this range include acetate (e.g. sodium acetate), succinate (such as sodium succinate), gluconate, histidine, citrate and other organic acid buffers. The buffer concentration can be from about 1 mM to about 200 mM, or from about 10 mM to about 60 mM, depending, for example, on the buffer and the desired isotonicity of the formulation.

[0666] A tonicity agent, which may also stabilize the antigen binding protein, may be included in the formulation. Exemplary tonicity agents include polyols, such as mannitol, sucrose or trehalose. Preferably the aqueous formulation is isotonic, although hypertonic or hypotonic solutions may be suitable. Exemplary concentrations of the polyol in the formulation may range from about 1% to about 15% w/v.

[0667] A surfactant may also be added to the antigen binding protein formulation to reduce aggregation of the formulated antigen binding protein and/or minimize the formation of particulates in the formulation and/or reduce adsorption. Exemplary surfactants include nonionic surfactants such as polysorbates (e.g., polysorbate 20 or polysorbate 80) or poloxamers (e.g., poloxamer 188). Exemplary concentrations of surfactant may range from about 0.001% to about 0.5%, or from about 0.005% to about 0.2%, or alternatively from about 0.004% to about 0.01% w/v.

[0668] In one embodiment, the formulation contains the above-identified agents (i.e. antigen binding protein, buffer, polyol and surfactant) and is essentially free of one or more preservatives, such as benzyl alcohol, phenol, m-cresol, chlorobutanol and benzethonium chloride. In another embodiment, a preservative may be included in the formulation, e.g., at concentrations ranging from about 0.1% to about 2%, or alternatively from about 0.5% to about 1%. One or more other pharmaceutically acceptable carriers, excipients or stabilizers such as those described in REMINGTON'S PHARMACEUTICAL SCIENCES, 18th Edition, (A.R. Genrmo, ed.), 1990, Mack Publishing Company, may be included in the formulation provided that they do not adversely affect the desired characteristics of the formulation.

[0669] Therapeutic formulations of the antigen binding protein are prepared for storage by mixing the antigen binding protein having the desired degree of purity with optional physiologically acceptable carriers, excipients or stabilizers (Remington's Pharmaceutical Sciences, 18th Ed., (A.R. Genrmo, ed.), 1990, Mack Publishing Company), in the form of lyophilized formulations or aqueous solutions. Acceptable carriers, excipients, or stabilizers are nontoxic to recipients at the dosages and concentrations employed, and include buffers (e.g. phosphate, citrate, and other organic acids); antioxidants (e.g. ascorbic acid and methionine); preservatives (such as octadecyldimethylbenzyl ammonium chloride, hexamethonium chloride, benzalkonium chloride, benzethonium chloride, phenol, butyl or benzyl alcohol, alkyl parabens such as methyl or propyl paraben, catechol; resorcinol, cyclohexanol, 3-pentanol, and m-cresol); low molecular weight (e.g. less than about 10 residues) polypeptides; proteins (such as serum albumin, gelatin, or immunoglobulins); hydrophilic polymers (e.g. polyvinylpyrrolidone); amino acids (e.g. glycine, glutamine, asparagine, histidine, arginine, or lysine); monosaccharides, disaccharides, and other carbohydrates including glucose, mannose, maltose, or dextrins; chelating agents such as EDTA; sugars such as sucrose, mannitol, trehalose or sorbitol; salt-forming counter-ions such as sodium; metal complexes (e.g., Zn-protein complexes); and/or non-ionic surfactants, such as polysorbates (e.g. polysorbate 20 or polysorbate 80) or poloxamers (e.g. poloxamer 188); or polyethylene glycol (PEG).

[0670] In one embodiment, a suitable formulation of the claimed invention contains an isotonic buffer such as a phosphate, acetate, or TRIS buffer in combination with a tonicity agent, such as a polyol, sorbitol, sucrose or sodium chloride, which tonicities and stabilizes. One example of such a tonicity agent is 5% sorbitol or sucrose. In addition, the formulation could optionally include a surfactant at 0.01% to 0.02% wt/vol, for example, to prevent aggregation or improve stability. The pH of the formulation may range from 4.5 to 6.5 or 4.5 to 5.5. Other exemplary descriptions of pharmaceutical formulations for antigen binding proteins may be found in US Patent Publication No. 2003/0113316 and U.S. Pat. No. 6,171,586, each of which is hereby incorporated by reference in its entirety.

[0671] Suspensions and crystal forms of antigen binding proteins are also contemplated. Methods to make suspensions and crystal forms are known to one of skill in the art.

[0672] The formulations to be used for in vivo administration must be sterile. The compositions of the invention may be sterilized by conventional, well-known sterilization techniques. For example, sterilization is readily accomplished by filtration through sterile filtration membranes. The resulting solutions may be packaged for use or filtered under aseptic conditions and lyophilized, the lyophilized preparation being combined with a sterile solution prior to administration.

[0673] The process of freeze-drying is often employed to stabilize polypeptides for long-term storage, particularly when the polypeptide is relatively unstable in liquid compositions. A lyophilization cycle is usually composed of three steps: freezing, primary drying, and secondary drying (see Williams and Polli, Journal of Parenteral Science and Technology, 1984, 38(2):48-59). In the freezing step, the solution is cooled until it is adequately frozen. Bulk water in the solution forms ice at this stage. The ice sublimes in the primary drying stage, which is conducted by reducing chamber pressure below the vapor pressure of the ice, using a vacuum. Finally, sorbed or bound water is removed at the secondary drying stage under reduced chamber pressure and an elevated shelf temperature. The process produces a material known as a lyophilized cake. Thereafter the cake can be reconstituted prior to use.

[0674] The standard reconstitution practice for lyophilized material is to add back a volume of pure water (typically equivalent to the volume removed during lyophilization), although dilute solutions of antibacterial agents are sometimes used in the production of pharmaceuticals for parenteral administration (see Chen, Drug Development and Industrial Pharmacy, Volume 18: 1311-1354, 1992).

[0675] Excipients have been noted in some cases to act as stabilizers for freeze-dried products (see Carpenter et al., Volume 74: 225-239, 1991). For example, known excipients include polyols (including mannitol, sorbitol and glycerol); sugars (including glucose and sucrose); and amino acids (including alanine, glycine and glutamic acid).

[0676] In addition, polyols and sugars are also often used to protect polypeptides from freezing and drying-induced damage and to enhance the stability during storage in the dried state. In general, sugars, in particular disaccharides, are effective in both the freeze-drying process and during storage. Other classes of molecules, including mono- and di-saccharides and polymers such as PVP, have also been reported as stabilizers of lyophilized products.

[0677] For injection, the pharmaceutical formulation and/or medicament may be a powder suitable for reconstitution with an appropriate solution as described above. Examples of these include, but are not limited to, freeze dried, rotary dried or spray dried powders, amorphous powders, granules, precipitates, or particulates. For injection, the formulations may optionally contain stabilizers, pH modifiers, surfactants, bioavailability modifiers and combinations of these.

[0678] Sustained-release preparations may be prepared. Suitable examples of sustained-release preparations include semipermeable matrices of solid hydrophobic polymers containing the antigen binding protein, which matrices are in the form of shaped articles, e.g., films, or microcapsule. Examples of sustained-release matrices include polyesters, hydrogels (for example, poly(2-hydroxyethyl-methacrylate), or poly(vinylalcohol)), polylactides (U.S. Pat. No. 3,773,919), copolymers of L-glutamic acid and y ethyl-L-glutamate, non-degradable ethylene-vinyl acetate, degradable lactic acid-glycolic acid copolymers such as the Lupron Depot™ (injectable microspheres composed of lactic acid-glycolic acid copolymer and leuprolide acetate), and poly-D-(−)-3-hydroxybutyric acid. While polymers such as ethylene-vinyl acetate and lactic acid-glycolic acid enable release of molecules for over 100 days, certain hydrogels release proteins for shorter time periods. When encapsulated polypeptides remain in the body for a long time, they may denature or aggregate as a result of exposure to moisture at 37° C., resulting in a loss of biological activity and possible changes in immunogenicity. Rational strategies can be devised for stabilization depending on the mechanism involved. For example, if the aggregation mechanism is discovered to be intermolecular S-S bond formation through thio-disulfide interchange, stabilization may be achieved by modifying sulfhydryl residues, lyophilizing from acidic solutions, controlling moisture content, using appropriate additives, and developing specific polymer matrix compositions.

[0679] The formulations of the invention may be designed to be short-acting, fast-releasing, long-acting, or sustained-releasing. Thus, the pharmaceutical formulations may also be formulated for controlled release or for slow release.

[0680] Specific dosages may be adjusted depending on the disease, disorder, or condition to be treated, the age, body weight, general health conditions, sex, and diet of the subject, dose intervals, administration routes, excretion rate, and combinations of drugs.

[0681] The TREM2 agonist antigen binding proteins of the invention can be administered by any suitable means, including parenteral, subcutaneous, intraperitoneal, intrapulmonary, intrathecal, intracerebral, intracerebroventricular, and intranasal, and, if desired for local treatment, intralesional administration. Parenteral administration includes intravenous, intraarterial, intraperitoneal, intramuscular, intradermal or subcutaneous administration. In addition, the antigen binding protein is suitably administered by pulse infusion, particularly with declining doses of the antigen binding protein. Preferably, the dosing is given by injections, most preferably intravenous or subcutaneous injections, depending in part on whether the administration is brief or chronic. Other administration methods are contemplated, including topical, particularly transdermal, transmucosal, rectal, oral or local administration e.g. through a catheter placed close to the desired site. In certain embodiments, the TREM2 agonist antigen binding protein of the invention is administered intravenously or subcutaneously in a physiological solution at a dose ranging between 0.01 mg/kg to 100 mg/kg at a frequency ranging from daily to weekly to monthly (e.g. every day, every other day, every third day, or 2, 3, 4, 5, or 6 times per week), preferably a dose ranging from 0.1 to 45 mg/kg, 0.1 to 15 mg/kg or 0.1 to 10 mg/kg at a frequency of once per week, once every two weeks, or once a month.

[0682] In some embodiments, the anti-TREM2 antibody is administered to a human patient via an IV infusion. In some embodiments, an IV infusion of anti-TREM2 antibody is up to about 5 hours, up to about 4 hours, up to about 3 hours, up to about 2 hours, or up to about 60 minutes. In some embodiments, an IV infusion of anti-TREM2 antibody is from about 5 minutes to about 5 hours, from about 5 minutes to about 4 hours, from about 5 minutes to about 3 hours, from about 5 minutes to about 2 hours, or from about 5 minutes to about 60 minutes. In some embodiments, an IV infusion of anti-TREM2 antibody is about 5 minutes, about 10 minutes, about 15 minutes, about 20 minutes, about 25 minutes, about 30 minutes, about 35 minutes, about 40 minutes, about 45 minutes, about 50 minutes, about 55 minutes, about 60 minutes, about 70 minutes, about 80 minutes, or about 90 minutes.

[0683] In some embodiments, anti-TREM2 antibody is administered to a human patient at a dose of up to about 200 mg/kg. In some embodiments, anti-TREM2 antibody is administered to a human patient at a dose of up to about 150 mg/kg. In some embodiments, anti-TREM2 antibody is administered to a human patient at a dose of up to about 100 mg/kg. In some embodiments, anti-TREM2 antibody is administered to a human patient at a dose of from about 1 mg/kg to about 100 mg/kg, from about 1 mg/kg to about 90 mg/kg, from about 1 mg/kg to about 80 mg/kg, from about 1 mg/kg to about 70 mg/kg, or from about 1 mg/kg to about 60 mg/kg. In some embodiments, anti-TREM2 antibody is administered to a human patient at a dose of about 1 mg/kg, about 2 mg/kg, about 3 mg/kg, about 5 mg/kg, about 10 mg/kg, about 15 mg/kg, about 20 mg/kg, about 25 mg/kg, about 30 mg/kg, about 35 mg/kg, about 40 mg/kg, about 45 mg/kg, about 50 mg/kg, about 55 mg/kg, or about 60 mg/kg.

[0684] In some embodiments, anti-TREM2 antibody is administered to a human patient once daily. In some embodiments, anti-TREM2 antibody is administered to a human patient 1, 2, 3 or 4 times weekly. In some embodiments, anti-TREM2 antibody is administered to a human patient 1, 2, 3 or 4 times monthly. In some embodiments, anti-TREM2 antibody is administered to a human patient once every 1, 2, 3, or 4 weeks. In some embodiments, anti-TREM2 antibody is administered to a human patient once every 2 days, 3 days, 4 days, 5 days, 6 days, 7 days, 8 days, 9 days, 10 days, or 14 days. In some embodiments, anti-TREM2 antibody is administered to a human patient once weekly.

[0685] In some embodiments, the present invention provides a liquid formulation, comprising anti-TREM2 antibody at a concentration of up to about 300 mg/mL. In some embodiments, the present invention provides a liquid formulation, comprising anti-TREM2 antibody at a concentration of up to about 250 mg/mL. In some embodiments, the present invention provides a liquid formulation, comprising anti-TREM2 antibody at a concentration of up to about 200 mg/mL. In some embodiments, the present invention provides a liquid formulation, comprising anti-TREM2 antibody at a concentration of up to about 150 mg/mL. In some embodiments, the present invention provides a liquid formulation, comprising anti-TREM2 antibody at a concentration of about 300 mg/mL, about 250 mg/mL, about 200 mg/mL, about 180 mg/mL, about 170 mg/mL, about 160 mg/mL, about 150 mg/mL, about 140 mg/mL, about 130 mg/mL, about 120 mg/mL, about 110 mg/mL, or about 100 mg/mL. In some embodiments, the present invention provides a liquid formulation, comprising anti-TREM2 antibody at a concentration of about 140 mg/mL. In some embodiments, a method of the invention comprises administering to a human patient a liquid formulation as described herein. In some embodiments, a method of the invention comprises administering to a human patient a liquid formulation, comprising anti-TREM2 antibody at a concentration of about 140 mg/mL.

[0686] The TREM2 agonist antigen binding proteins described herein (e.g. anti-TREM2 agonist monoclonal antibodies and binding fragments thereof) are useful for preventing, treating, or ameliorating a condition associated with TREM2 deficiency or loss of biological function of TREM2 in a patient in need thereof. As used herein, the term “treating” or “treatment” is an intervention performed with the intention of preventing the development or altering the pathology of a disorder. Accordingly, “treatment” refers to both therapeutic treatment and prophylactic or preventative measures. Patients in need of treatment include those already diagnosed with or suffering from the disorder or condition as well as those in which the disorder or condition is to be prevented, such as patients who are at risk of developing the disorder or condition based on, for example, genetic markers. “Treatment” includes any indicia of success in the amelioration of an injury, pathology or condition, including any objective or subjective parameter such as abatement, remission, diminishing of symptoms, or making the injury, pathology or condition more tolerable to the patient, slowing in the rate of degeneration or decline, making the final point of degeneration less debilitating, or improving a patient's physical or mental well-being. The treatment or amelioration of symptoms can be based on objective or subjective parameters, including the results of a physical examination, self-reporting by a patient, cognitive tests, motor function tests, neuropsychiatric exams, and/or a psychiatric evaluation.

### III. Small Molecule TREM2 Agonists

[0687] In some embodiments, the agonist of TREM2 is a small molecule agonist of TREM2.

[0688] In some embodiments, the agonist of TREM2 is a lipid ligand of TREM2. In some embodiments, the lipid ligand of TREM2 is selected from 1-palmitoyl-2-(5′-oxo-valeroyl)-sn-glycero-3-phosphocholine (POVPC), 2-Arachidonoylglycerol (2-AG), 7-ketocholesterol (7-KC), 24(S)hydroxycholesterol (240HC), 25(S)hydroxycholesterol (250HC), 27-hydroxycholesterol (270HC), Acyl Carnitine (AC), alkylacylglycerophosphocholine (PAF), a-galactosylceramide (KRN7000), Bis(monoacylglycero)phosphate (BMP), Cardiolipin (CL), Ceramide, Ceramide-1-phosphate (CIP), Cholesteryl ester (CE), Cholesterol phosphate (CP), Diacylglycerol 34: 1 (DG 34: 1), Diacylglycerol 38:4 (DG 38:4), Diacylglycerol pyrophosphate (DGPP), Dihyrdoceramide (DhCer), Dihydrosphingomyelin (DhSM), Ether phosphatidylcholine (PCe), Free cholesterol (FC), Galactosylceramide (GalCer), Galactosylsphingosine (GalSo), Ganglioside GM1, Ganglioside GM3, Glucosylsphingosine (GlcSo), Hank's Balanced Salt Solution (HBSS), Kdo2-Lipid A (KLA), Lactosylceramide (LacCer), lysoalkylacylglycerophosphocholine (LPAF), Lysophosphatidic acid (LPA), Lysophosphatidylcholine (LPC), Lysophosphatidylethanolamine (LPE), Lysophosphatidylglycerol (LPG), Lysophosphatidylinositol (LPI), Lysosphingomyelin (LSM), Lysophosphatidylserine (LPS), N-Acyl-phosphatidylethanolamine (NAPE), N-Acyl-Serine (NSer), Oxidized phosphatidylcholine (oxPC), Palmitic-acid-9-hydroxy-stearic-acid (PAHSA), Phosphatidylethanolamine (PE), Phosphatidylethanol (PEtOH), Phosphatidic acid (PA), Phosphatidylcholine (PC), Phosphatidylglycerol (PG), Phosphatidylinositol (PI), Phosphatidylserine (PS), Sphinganine, Sphinganine-1-phosphate (SalP), Sphingomyelin (SM), Sphingosine, Sphingosine-1-phosphate (SolP), or Sulfatide, or a salt thereof.

[0689] In some embodiments, the agonist of TREM2 is a lipopolysaccharide.

[0690] In some embodiments, the agonist of TREM2 is a small molecule disclosed in PCT Application Publication WO2019/079529, which is incorporated by reference herein in its entirety. In some embodiments, the agonist of TREM2 is Tyrphostin AG 538, AC1NS458, IN1040, Butein, Okanin, AGL 2263, GB19, GB16, GB20, GB17, GB18, GB21, GB22, GB27, GB44, GB42, GB2, 4,4′-Dihydroxychalcone, or 3,4-Dihydroxybenzophenone, or a derivative or salt of any of the aforementioned.

[0691] In some embodiments, the agonist of TREM2 is a small molecule identified by a method disclosed in PCT Application Publication WO2019/079529. In some embodiments, the small molecule agonist of TREM2 is identified by applying the small molecule compound to a host cell expressing TREM2 and tyrosine kinase binding protein (TYROBP), wherein the host cell has a synthetic sequence comprising an NFAT-response element and a nucleotide sequence encoding a reporter, and measuring a signal emitted by the reporter.

[0692] In some embodiments, the agonist of TREM2 is a small molecule disclosed in PCT Application Publication WO2021/226135 or WO2021/226629.

[0693] In some embodiments, the agonist of TREM2 is a TREM2 agonist compound comprising a bicyclic core. In some embodiments, the bicyclic core is a 10-membered heteroaryl core. In some embodiments, the TREM2 agonist compound comprises a 10-membered heteroaryl core, comprising 1-4 nitrogen atoms as part of the core ring structure. In some embodiments, the TREM2 agonist compound comprises a 10-membered heteroaryl core, comprising 3 or 4 substituent groups.

### IV. Other TREM2 Agonists

[0694] In some embodiments, the agonist of TREM2 is heat shock protein 60 (HSP60).

[0695] In some embodiments, the agonist of TREM2 is apopoliprotein E (ApoE).

### V. Pharmaceutically Acceptable Compositions

[0696] In certain embodiments, a TREM2 activating antibody or small molecule disclosed herein is formulated as a composition for administration to a patient in need of such composition.

[0697] The term “pharmaceutically acceptable carrier, adjuvant, or vehicle” refers to a non-toxic carrier, adjuvant, or vehicle that does not destroy the pharmacological activity of the compound with which it is formulated. Pharmaceutically acceptable carriers, adjuvants or vehicles that may be used in the compositions of this invention include, but are not limited to, ion exchangers, alumina, aluminum stearate, lecithin, serum proteins, such as human serum albumin, buffer substances such as phosphates, glycine, sorbic acid, potassium sorbate, partial glyceride mixtures of saturated vegetable fatty acids, water, salts or electrolytes, such as protamine sulfate, disodium hydrogen phosphate, potassium hydrogen phosphate, sodium chloride, zinc salts, colloidal silica, magnesium trisilicate, polyvinyl pyrrolidone, cellulose-based substances, polyethylene glycol, sodium carboxymethylcellulose, polyacrylates, waxes, polyethylene-polyoxypropylene-block polymers, polyethylene glycol and wool fat.

[0698] A “pharmaceutically acceptable derivative” means any non-toxic salt, ester, salt of an ester or other derivative of a compound of this invention that, upon administration to a recipient, is capable of providing, either directly or indirectly, a compound of this invention or an inhibitorily active metabolite or residue thereof.

[0699] Compositions of the present invention may be administered orally, parenterally, by inhalation spray, topically, rectally, nasally, buccally, vaginally or via an implanted reservoir. The term “parenteral” as used herein includes subcutaneous, intravenous, intramuscular, intra-articular, intra-synovial, intrasternal, intrathecal, intrahepatic, intralesional and intracranial injection or infusion techniques. In some embodiments, the compositions are administered orally, intraperitoneally or intravenously. Sterile injectable forms of the compositions of this invention may be aqueous or oleaginous suspension. These suspensions may be formulated according to techniques known in the art using suitable dispersing or wetting agents and suspending agents. The sterile injectable preparation may also be a sterile injectable solution or suspension in a non-toxic parenterally acceptable diluent or solvent, for example as a solution in 1,3-butanediol. Among the acceptable vehicles and solvents that may be employed are water, Ringer's solution and isotonic sodium chloride solution. In addition, sterile, fixed oils are conventionally employed as a solvent or suspending medium.

[0700] For this purpose, any bland fixed oil may be employed including synthetic mono- or di-glycerides. Fatty acids, such as oleic acid and its glyceride derivatives are useful in the preparation of injectables, as are natural pharmaceutically-acceptable oils, such as olive oil or castor oil, especially in their polyoxyethylated versions. These oil solutions or suspensions may also contain a long-chain alcohol diluent or dispersant, such as carboxymethyl cellulose or similar dispersing agents that are commonly used in the formulation of pharmaceutically acceptable dosage forms including emulsions and suspensions. Other commonly used surfactants, such as Tweens, Spans and other emulsifying agents or bioavailability enhancers which are commonly used in the manufacture of pharmaceutically acceptable solid, liquid, or other dosage forms may also be used for the purposes of formulation.

[0701] Pharmaceutically acceptable compositions of this invention may be orally administered in any orally acceptable dosage form including, but not limited to, capsules, tablets, aqueous suspensions or solutions. In the case of tablets for oral use, carriers commonly used include lactose and corn starch. Lubricating agents, such as magnesium stearate, are also typically added. For oral administration in a capsule form, useful diluents include lactose and dried cornstarch. When aqueous suspensions are required for oral use, the active ingredient is combined with emulsifying and suspending agents. If desired, certain sweetening, flavoring or coloring agents may also be added.

[0702] Alternatively, pharmaceutically acceptable compositions of this invention may be administered in the form of suppositories for rectal administration. These can be prepared by mixing the agent with a suitable non-irritating excipient that is solid at room temperature but liquid at rectal temperature and therefore will melt in the rectum to release the drug. Such materials include cocoa butter, beeswax and polyethylene glycols.

[0703] Pharmaceutically acceptable compositions of this invention may also be administered topically, especially when the target of treatment includes areas or organs readily accessible by topical application, including diseases of the eye, the skin, or the lower intestinal tract. Suitable topical formulations are readily prepared for each of these areas or organs.

[0704] Topical application for the lower intestinal tract can be effected in a rectal suppository formulation (see above) or in a suitable enema formulation. Topically-transdermal patches may also be used.

[0705] For topical applications, provided pharmaceutically acceptable compositions may be formulated in a suitable ointment containing the active component suspended or dissolved in one or more carriers. Carriers for topical administration of compounds of this invention include, but are not limited to, mineral oil, liquid petrolatum, white petrolatum, propylene glycol, polyoxyethylene, polyoxypropylene compound, emulsifying wax and water. Alternatively, provided pharmaceutically acceptable compositions can be formulated in a suitable lotion or cream containing the active components suspended or dissolved in one or more pharmaceutically acceptable carriers. Suitable carriers include, but are not limited to, mineral oil, sorbitan monostearate, polysorbate 60, cetyl esters wax, cetearyl alcohol, 2-octyldodecanol, benzyl alcohol and water.

[0706] For ophthalmic use, provided pharmaceutically acceptable compositions may be formulated as micronized suspensions in isotonic, pH adjusted sterile saline, or as solutions in isotonic, pH adjusted sterile saline, either with or without a preservative such as benzylalkonium chloride. Alternatively, for ophthalmic uses, the pharmaceutically acceptable compositions may be formulated in an ointment such as petrolatum.

[0707] Pharmaceutically acceptable compositions of this invention may also be administered by nasal aerosol or inhalation. Such compositions are prepared according to techniques well-known in the art of pharmaceutical formulation and may be prepared as solutions in saline, employing benzyl alcohol or other suitable preservatives, absorption promoters to enhance bioavailability, fluorocarbons, and/or other conventional solubilizing or dispersing agents.

[0708] In some embodiments, pharmaceutically acceptable compositions of this invention are formulated for oral administration. Such formulations may be administered with or without food. In some embodiments, pharmaceutically acceptable compositions of this invention are administered without food. In other embodiments, pharmaceutically acceptable compositions of this invention are administered with food.

[0709] In other embodiments, pharmaceutically acceptable compositions of this invention are formulated for intravenous (IV) administration.

[0710] The amount of compounds of the present invention that may be combined with the carrier materials to produce a composition in a single dosage form will vary depending upon the host treated, the particular mode of administration. Preferably, provided compositions should be formulated so that a dosage of between 0.01-100 mg/kg body weight/day of the inhibitor can be administered to a patient receiving these compositions.

[0711] It should also be understood that a specific dosage and treatment regimen for any particular patient will depend upon a variety of factors, including the activity of the specific compound employed, the age, body weight, general health, sex, diet, time of administration, rate of excretion, drug combination, and the judgment of the treating physician and the severity of the particular disease being treated. The amount of a compound of the present invention in the composition will also depend upon the particular compound in the composition.

[0712] All features of each of the aspects of the disclosure apply to all other aspects mutatis mutandis. Each of the references referred to herein, including but not limited to patents, patent applications and journal articles, is incorporated by reference herein as though fully set forth in its entirety.

[0713] In order that the disclosure described herein may be more fully understood, the following examples are set forth. It should be understood that these examples are for illustrative purposes only and are not to be construed as limiting this disclosure in any manner.

### EXAMPLES

### General Procedures

### Microglial Differentiation Protocol

[0714] Pluripotent stem cell (PSC) differentiation is induced with mTeSR Custom medium (STEMCELLTechnologies®) containing 80 ng/mL BMP4. At day 4, cells are induced with 25 ng/mL basic fibroblast growth factor, 100 ng/mL stemcell factor (SCF), and 80 ng/mL vascular endothelial growth factor in StemPro-34 SFM (with 2 mM GutaMAX, Life Technologies). Two days later, the medium is supplemented with 50 ng/mL SCF, 50 ng/mL IL-3, 5 ng/mL thrombopoietin, 50 ng/mL macrophage CSF (M-CSF) and 50 ng/mL Flt31, and from day 14 with 50 ng/mL M-CSF, 50 ng/mL Flt31, and 25 ng/mL GMCSF. Between days 25 and 50, CD14+ or CD14+CX3CR1+ progenitors are isolated and plated onto tissue culture-treated dishes or Thermanox plastic coverslips (all from Thermo Fisher Scientific) in Microglial Medium (RPMI-1640 [Life Technologies] with 2 mM GlutaMAX-I, 10 ng/mL GM-CSF, and 100 ng/mL IL-34). Medium is replenished every 3-4 days for at least 2 weeks.

Generation of Induced Pluripotent Stem Cells (iPSCs) from Primary Healthy, Adrenomyeloneuropathy (AMIV) and Cerebral Childhood ALD (cALD) Fibroblasts

[0715] Fibroblast cell cultures from healthy individuals (AG01439, male 3 days old), Adrenomyeloneuropathy (AMN) (GM 07530, male 26 years old) and cALD (GM04934, male 7 years old with VLCFA abnormality and clinical X-ALD disease) patients are obtained. A control human IPSC ATCC-DYR0100 cell line is also obtained. Fibroblasts are cultured in DMEM with 10% FBS, 2 mM L-glutamine and 1% penicillin/streptomycin at 37° C. with 5% CO₂.

[0716] Fibroblast cells seeded at 0.2×106 cells/well of a 6-well plate in fibroblast medium (DMEM+10% FBS) are transduced with six lentiviral vectors designed to deliver human OCT4, SOX2, c-MYC, KLF4, Nanog and Lin28 cDNA sequences. On the next day, fresh fibroblast media is added to the cells 24 hours after transduction. At 48 hours after transduction the media is changed to half E8 medium and half fibroblast medium. When the cells reach about 60% confluence they are transferred to 10 cm Matrigel-coated plates (one well of a 6-well plate into one 10 cm dish) in E8 medium (StemCell Technologies) and media is replaced daily. Between day 15 and day 30 in culture, individual hiPS clones are manually picked using a Leica stereomicroscope. Each hiPS clone is expanded and characterized by immunofluorescence for the expression of Oct4 and Tra-1-60. IPSCs are cultured on a Matrigel (BD-Biosciences) coated plate in IPSC medium (mTeSR media from Stemcell technologies, Vancouver, Canada) and media is changed daily until cells are ready for passage.

### Microglia Characterization Assays and Methods

[0717] Microglia are analyzed using flow cytometry, immunohistochemistry and cell quantification procedures such as those disclosed by Masuda et al. (Masuda et al., Nature. 2019; 566: 388-394.)

### Monocyte Derived Macrophage Isolation Protocols

[0718] Monocyte derived macrophages (MDMs) are derived from PBMCs collected from patients with adrenomyeloneuropathy (AMN) or cALD and isolated by magnetic bead separation and differentiation into macrophages as reported in Jin, et al. J Vis Exp. 2016; (112): 54244. CD14+ monocytes are collected for use in the Examples described below.

### Example 1. The Effects of TREM2 Agonists on Microglia after VLCFA Challenge

### Conceptual Basis

[0719] Saturated very long chain fatty acids (VLCFAs; ≥C22:0) accumulate in the microglia of patients suffering from X-linked adrenoleukodystrophy (X-ALD, OMIM 300100), a severe hereditary neurodegenerative disease, due to peroxisomal impairment. Previous studies analysed the development of X-ALD in humans and gene knockout animal models. However, the toxic effect of VLCFA leading to severe symptoms with progressive and multifocal demyelination, adrenal insufficiency and inflammation still remains unclear. To understand the toxic effects of VLCFA in the brain, neural cells are exposed to VLCFA and the effects are analyzed. Oligodendrocytes and astrocytes challenged with docosanoic- (C22:0), tetracosanoic- (C24:0) and hexacosanoic acids (C26:0) die within 24 h. VLCFA-induced depolarization of mitochondria in situ and increased intracellular Ca21 level in all three brain cell types provides indications about the mechanism of toxicity of VLCFA. VLCFAs affect to the largest degree the myelin-producing oligodendrocytes. In isolated mitochondria, VLCFAs exert a detrimental effect by affecting the inner mitochondrial membrane and promoting the permeability transition. Without intending to be limited to any particular theory, it is reasonable to conclude that there is potent toxic activity of VLCFA due to dramatic cell physiological effects with mitochondrial dysfunction and Ca21 deregulation. This provides evidence for mitochondrial-based cell death mechanisms in neurodegenerative diseases with peroxisomal defects and subsequent VLCFA accumulation. Treatment with a TREM2 agonist rescues at least some of the deleterious effects of VLCFA accumulation in microglia, by preventing apoptosis and activating phagocytic mechanisms to clear myelin debris to lower inflammation in the vicinity of axonopathy.

### Experiments

[0720] Healthy patient-derived microglia are plated in 96 well microtiter plates. Each well also contains either a TREM2 agonist (eg. a TREM2 antibody agonist or TREM2 small molecule agonist) or a control compound (eg. an isotype control IgG as a control antibody or DMSO as a control small molecule). An exemplary method uses an immobilized TREM2 antibody agonist in the test wells at 10 μg/well and an isotype control plated in the control wells at 10 μg/well. Another exemplary method uses a solubilized TREM2 antibody agonist or small molecule agonist in the test wells. Cells are maintained in CSF1-containing culture medium (50 ng/mL) for 2 days prior to adding VLCFA (e.g., C26:0, C24:0, C22:0 added at 10-20 uM concentration to culture medium; Hein et al., Human Molecular Genetics. 2008; 17: 1750-176.). After 24 hrs of VLCFA challenge, wells are analyzed microscopically by immunohistochemical staining, e.g., by staining for Iba1, P2YR12 or other myeloid cell surface markers, staining for caspases, which indicate cell apoptosis, and for the number of viable cells as well as for cell morphology. Other microtiter wells can be treated with lysis buffer to collect mRNA for qPCR analysis for markers of myeloid phenotype, such as homeostatic or activated cell states (Keren-Shaul et al., Cell. 2017; 169: 1276-1290; Decskowska et al., Cell. 2018; 173:1073-1081.). Other microtiter wells can be analyzed for total cell death by measuring lactate dehydrogenase levels, a measure of cell lysis, from the culture supernatant (Hein et al., Human Molecular Genetics. 2008; 17: 1750-176.). This experiment can be modified to measure the kinetics of phenotypic transition following the pilot described above by analyzing changes over time and at various doses of VGL101 to understand the dose dependence of rescue. In addition, the Incucyte method of monitoring cell cultures can be used to monitor for morphological changes in real time.

[0721] The above experiments are also repeated using monocytes derived macrophages, in place of the microglia.

### Example 2. The Effects of TREM2 Agonists on Microglia with an ABCD1 Dysfunction

### Conceptual Basis

[0722] Microglia derived from patients suffering from cALD, such as by differentiating patient iPSC or patient monocytes, have transcriptional and biochemical signatures distinct from healthy donor-derived microglia, e.g., potentially enriched for disease associated microglia (DAM). Treatment of cALD patient-derived microglia with VLCFA in vitro will cause toxic and pro-inflammatory effects due to accumulation of fatty acids from dysfunctional peroxisome-mediated metabolism. cALD microglia may also autonomously accumulate VLCFAs without an extracellular challenge. Rescue of the cytotoxicity and inflammatory state by treating with TREM2 agonists during VLCFA challenge can be characterized through transcriptional and biochemical analyses.

### Experiments

[0723] iPSC or monocyte-derived microglia, derived from patients suffering from an ABCD1 dysfunction, such as cALD or AMN, are plated in 96 well microtiter plates. Each well also contains either a TREM2 agonist (eg. a TREM2 antibody agonist or TREM2 small molecule agonist) or a control compound (eg. an isotype control IgG as a control antibody or DMSO as a control small molecule). An exemplary method uses an immobilized TREM2 antibody agonist in the test wells at 10 μg/well and an isotype control plated in the control wells at 10 μg/well. Another exemplary method uses a solubilized TREM2 antibody agonist or small molecule agonist in the test wells. Cells are maintained in a CSF1-containing culture medium (50 ng/mL) for 2 days prior to adding VLCFA (e.g., C26:0, C24:0, C22:0 added at 10-20 uM concentration to culture medium; Hein et al., Human Molecular Genetics. 2008; 17: 1750-176.). Vehicle is added to select wells, in place of the VLCFA. After 24 hrs of challenge, wells are analyzed microscopically by immunohistochemical staining, e.g., by staining for Iba1, PYR12 or other myeloid cell surface markers, staining for caspases, which indicate cell apoptosis, and for the number of viable cells as well as for cell morphology. Other microtiter wells can be treated with lysis buffer to collect mRNA for qPCR analysis for markers of myeloid phenotype, such as homeostatic or activated cell states (Keren-Shaul et al., Cell. 2017; 169: 1276-1290; Decskowska et al., Cell. 2018; 173:1073-1081.). Other microtiter wells can be analyzed for total cell death by measuring lactate dehydrogenase levels, a measure of cell lysis, from the culture supernatant (Hein et al., Human Molecular Genetics. 2008; 17: 1750-176.). This experiment can be modified to measure the kinetics of phenotypic transition following the pilot described above by analyzing changes over time and at various doses of VLCFA or VGL101 to understand the dose dependence of rescue. In addition, the Incucyte method of monitoring cell cultures can be used to monitor for morphological changes in real time.

[0724] The above experiments are also repeated using monocytes derived macrophages, in place of the iPSC or microglia. The above experiments may also be repeated, wherein the VLCFA challenge is replaced with alternative additions known to induce increased accumulation of VLCFAs in cALD microglia. For example, myelin debris or lipids can be added to the wells in place of the VLCFA.

### Example 3. Neurofilament Light Chain as a Biomarker for Tracking x-ALD Treatment Efficacy

[0725] Monitoring of serum from patients with x-ALD for levels of neurofilament light chain (NfL) in order to select patients for treatment, and to monitor the efficacy of treatment will be done as follows. Serum is collected from patients at various time points as required for the use. Serum is stored in sample aliquots at −80° C. When ready for analysis, samples are thawed on ice. Measurement of NfL is determined using an assay run on a Simoa® HD-1 instrument (QUANTERIX) using a 2-step Assay Neat 2.0 protocol; 100 μl of sample or calibrator (diluent: Tris-buffered saline [TBS], 0.1% Tween 20, 1% milk powder, 400 μg/ml Heteroblock [Omega Biologicals, Bozeman, Mont.]), 25 μl conjugated beads (diluent: TBS, 0.1% Tween 20, 1% milk powder, 300 ug/ml Heteroblock), and 20 μl of mAB 2:1 (0.1 μg/ml; diluent: TBS, 0.1% Tween 20, 1% milk powder, 300 ug/ml Heteroblock) are incubated for 47 cadences (1 cadence=45 seconds). After washing, 100 μl of streptavidin-conjugated b-galactosidase (150 pM; Quanterix) is added, followed by a 7-cadence incubation and a wash. Prior to reading, 25 μl resorufin b-D-galactopyranoside (QUANTERIX) is added. Calibrators (neat) and samples (serum: 1:4 dilution) are measured in duplicates. Bovine lyophilized NfL is obtained from UmanDiagnostics. Calibrators ranged from 0 to 2,000 pg/ml for serum and from 0 to 10,000 pg/ml for CSF measurements. Batch prepared calibrators are stored at −80° C. Final NfL levels measured by the above method are used to help both select patients to treat with an agonist of TREM2 and guide response to treatment with an agonist of TREM2.

1. A method of treating a disease or disorder caused by and/or associated with ATP-binding cassette transporter 1 (ABCD1) dysfunction in a human patient, the method comprising administering to the patient an effective amount of an agonist of triggering receptor expressed on myeloid cells 2 (TREM2), wherein the agonist of TREM2 is selected from (i) an antigen binding protein or an antibody, or an antigen-binding fragment thereof; and (ii) a small molecule.

2. The method of claim 1, wherein the disease or disorder is selected from X-linked adrenoleukodystrophy (x-ALD), cerebral x-ALD (cALD), Globoid cell leukodystrophy, Metachromatic leukodystrophy (MLD), Cerebral autosomal dominant arteriopathy with subcortical infarcts and leukoencephalopathy (CADASIL), Alexander disease, fragile X-associated tremor ataxia syndrome (FXTAS), adult-onset autosomal dominant leukodystrophy (ADLD), and X-linked Charcot-Marie-Tooth disease (CMTX).

3. The method of claim 1, wherein the patient exhibits ABCD1 dysfunction, and/or has a mutation in a gene affecting the function of ABCD1.

4. The method of claim 1, wherein the disease or disorder is x-ALD.

5. The method of claim 1, wherein the disease or disorder is Addison disease wherein the patient has been found to have a mutation in one or more ABCD1 genes affecting ABCD1 function.

6. The method of claim 1, wherein upon administration to the patient, the agonist of TREM2:
(a) increases microglia function; and/or
(b) activates TREM2/DAP12 signaling in myeloid cells.

7. (canceled)

8. The method of claim 1, wherein upon administration to the patient, the agonist of TREM2 results in one or more TREM2 activities selected from:
(a) one or more of TREM2 binding to DAP12; DAP12 binding to TREM2; TREM2 phosphorylation; and DAP12 phosphorylation;
(b) PI3K activation;
(c) increased levels of soluble TREM2 (sTREM2);
(d) increased levels of soluble CSF1R (sCSF1R);
(e) increased expression of one or more anti-inflammatory mediators selected from the group consisting of IL-12p70, IL-4, IL-6, and IL-10;
(f) reduced expression of one or more pro-inflammatory mediators selected from the group consisting of IFN-a4, IFN-b, IL-6, IL-12 p70, IL-12 p40, TNF, IL-1β, TNF-α, IL-10, IL-8, CRP, TGF-beta members of the chemokine protein families, IL-20 family members, IL-33, LIF, IFN-gamma, OSM, CNTF, TGF-beta, GM-CSF, IL-11, IL-12, IL-17, IL-18, and CRP;
(g) increased expression of one or more chemokines selected from the group consisting of CCL2, CCL4, CXCL10, CCL3 and CST7;
(h) reduced expression of TNF-α, IL-6, or both; extracellular signal-regulated kinase (ERK) phosphorylation; increased expression of C-C chemokine receptor 7 (CCR7);
(i) induction of microglial cell chemotaxis toward CCL19 and CCL21 expressing cells;
(j) an increase, normalization, or both of the ability of bone marrow-derived dendritic cells to induce antigen-specific T-cell proliferation;
(k) induction of osteoclast production, increased rate of osteoclastogenesis, or both;
increasing the survival and/or function of one or more of dendritic cells, macrophages, microglial cells, M1 macrophages and/or microglial cells, activated M1 macrophages and/or microglial cells, M2 macrophages and/or microglial cells, monocytes, osteoclasts, Langerhans cells of skin, and Kupffer cells;
(l) induction of one or more types of clearance selected from the group consisting of apoptotic neuron clearance, nerve tissue debris clearance, non-nerve tissue debris clearance, bacteria or other foreign body clearance, disease-causing protein clearance, disease-causing peptide clearance, and disease-causing nucleic acid clearance;
(m) induction of phagocytosis of one or more of apoptotic neurons, nerve tissue debris, non-nerve tissue debris, bacteria, other foreign bodies, disease-causing proteins, disease-causing peptides, or disease-causing nucleic acids; normalization of disrupted TREM2/DAP12-dependent gene expression;
(n) recruitment of Syk, ZAP70, or both to the TREM2/DAP12 complex; Syk phosphorylation; increased expression of CD83 and/or CD86 on dendritic cells, macrophages, monocytes, and/or microglia;
(o) reduced secretion of one or more inflammatory cytokines selected from the group consisting of TNF-α, IL-10, IL-6, MCP-1, IFN-α4, IFN-b, IL-1β, IL-8, CRP, TGF-beta members of the chemokine protein families, IL-20 family members, IL-33, LIF, IFN-gamma, OSM, CNTF, TGF-beta, GM-CSF, IL-11, IL-12, IL-17, IL-18, and CRP;
(p) reduced expression of one or more inflammatory receptors; increasing phagocytosis by macrophages, dendritic cells, monocytes, and/or microglia under conditions of reduced levels of MCSF;
(q) decreasing phagocytosis by macrophages, dendritic cells, monocytes, and/or microglia in the presence of normal levels of MCSF; increasing activity of one or more TREM2-dependent genes;
(r) increased levels of one or more of CSF1, CSF2 and IL-34; and
(s) any combination thereof.

9. The method of claim 1, wherein the agonist of TREM2 is an antigen binding protein or an antibody, or an antigen-binding fragment thereof.

10. (canceled)

11. The method of claim 9, wherein the agonist of TREM2 is a humanized antibody or a human antibody.

12. (canceled)

13. The method of claim 1, wherein the agonist of TREM2 is an antibody that specifically binds to the polypeptide of SEQ ID NO: 1.

14. (canceled)

15. (canceled)

16. The method of claim 9, wherein the agonist of TREM2 is:
(a) an antibody comprising a light chain variable region having a CDRL1, CDRL2, and CDRL3 selected from Table EX1 and A10, and a heavy chain variable region having a CDRH1, CDRH2, and CDRH3 selected from Table EX2 and A11; or
(b) an antibody having a CDRL1 comprising a sequence selected from SEQ ID NOs: 5-18; a CDRL2 comprising a sequence selected from SEQ ID NOs: 19-30; a CDRL3 comprising a sequence selected from SEQ ID NOs: 31-45; a CDRH1 comprising a sequence selected from SEQ ID NOs: 77-86; a CDRH2 comprising a sequence selected from SEQ ID NOs: 87-94; and a CDRH3 comprising a sequence selected from SEQ ID NOs: 95-109.

17. (canceled)

18. The method of claim 9, wherein the TREM2 agonist is an antibody comprising:
(a) a CDRL1, CDRL2, and CDRL3 comprising the sequence of SEQ ID NOs: 8, 22, and 35, respectively, and a CDRH1, CDRH2, and CDRH3 comprising the sequence of SEQ ID NOs: 77, 368, and 98, respectively;
(b) a CDRL1, CDRL2, and CDRL3 comprising the sequence of SEQ ID NOs: 16, 369, and 370, respectively, and a CDRH1, CDRH2, and CDRH3 comprising the sequence of SEQ ID NOs: 85, 371, and 107, respectively;
(c) a CDRL1, CDRL2, and CDRL3 comprising the sequence of SEQ ID NOs: 10, 23, and 372, respectively, and a CDRH1, CDRH2, and CDRH3 comprising the sequence of SEQ ID NOs: 81, 373, and 374, respectively; or
(d) a CDRL1, CDRL2, and CDRL3 comprising the sequence of SEQ ID NOs: 17, 29, and 44, respectively, and a CDRH1, CDRH2, and CDRH3 comprising the sequence of SEQ ID NOs: 86, 94, and 375, respectively.

19. (canceled)

20. The method of claim 9, wherein the TREM2 agonist antigen binding protein comprises a light chain variable region comprising a sequence selected from SEQ ID NOs: 46-63 and a heavy chain variable region comprising a sequence selected from SEQ ID NOs: 110-126.

21. The method of claim 9, wherein the TREM2 agonist antigen binding protein comprises
(a) a light chain variable region comprising the amino acid sequence of SEQ ID NO: 326 and a heavy chain variable region comprising the amino acid sequence of SEQ ID NO: 327;
(b) a light chain variable region comprising the amino acid sequence of SEQ ID NO: 328 and a heavy chain variable region comprising the amino acid sequence of SEQ ID NO: 329;
(c) a light chain variable region comprising the amino acid sequence of SEQ ID NO: 330 and a heavy chain variable region comprising the amino acid sequence of SEQ ID NO: 331; or
(d) a light chain variable region comprising the amino acid sequence of SEQ ID NO: 332 and a heavy chain variable region comprising the amino acid sequence of SEQ ID NO: 333.

22. The method of claim 1, wherein the agonist of TREM2 is a small molecule agonist of TREM2.

23. The method of claim 22, wherein the agonist of TREM2 is a lipid ligand of TREM2.

24. The method of claim 23, wherein the agonist of TREM2 is selected from 1-palmitoyl-2-(5′-oxo-valeroyl)-sn-glycero-3-phosphocholine (POVPC), 2-Arachidonoylglycerol (2-AG), 7-ketocholesterol (7-KC), 24(S)hydroxycholesterol (240HC), 25(S)hydroxycholesterol (250HC), 27-hydroxycholesterol (270HC), Acyl Carnitine (AC), alkylacylglycerophosphocholine (PAF), a-galactosylceramide (KRN7000), Bis(monoacylglycero)phosphate (BMP), Cardiolipin (CL), Ceramide, Ceramide-1-phosphate (CIP), Cholesteryl ester (CE), Cholesterol phosphate (CP), Diacylglycerol 34: 1 (DG 34: 1), Diacylglycerol 38:4 (DG 38:4), Diacylglycerol pyrophosphate (DGPP), Dihyrdoceramide (DhCer), Dihydrosphingomyelin (DhSM), Ether phosphatidylcholine (PCe), Free cholesterol (FC), Galactosylceramide (GalCer), Galactosyl sphingosine (GalSo), Ganglioside GM1, Ganglioside GM3, Glucosylsphingosine (GlcSo), Hank's Balanced Salt Solution (HB SS), Kdo2-Lipid A (KLA), Lactosylceramide (LacCer), lysoalkylacylglycerophosphocholine (LPAF), Lysophosphatidic acid (LPA), Lysophosphatidylcholine (LPC), Lysophosphatidylethanolamine (LPE), Lysophosphatidylglycerol (LPG), Lysophosphatidylinositol (LPI), Lysosphingomyelin (LSM), Lysophosphatidylserine (LPS), N-Acyl-phosphatidylethanolamine (NAPE), N-Acyl-Serine (NSer), Oxidized phosphatidylcholine (oxPC), Palmitic-acid-9-hydroxy-stearic-acid (PAHSA), Phosphatidylethanolamine (PE), Phosphatidylethanol (PEtOH), Phosphatidic acid (PA), Phosphatidylcholine (PC), Phosphatidylglycerol (PG), Phosphatidylinositol (PI), Phosphatidylserine (PS), Sphinganine, Sphinganine-1-phosphate (SalP), Sphingomyelin (SM), Sphingosine, Sphingosine-1-phosphate (SolP), or Sulfatide, or a salt thereof.

25. The method of claim 23, wherein the agonist of TREM2 is a lipopolysaccharide.

26. The method of claim 22, wherein the agonist of TREM2 is selected from Tyrphostin AG 538, AC1NS458, IN1040, Butein, Okanin, AGL 2263, GB19, GB16, GB20, GB17, GB18, GB21, GB22, GB27, GB44, GB42, GB2, 4,4′-Dihydroxychalcone, or 3,4-Dihydroxybenzophenone, or a salt thereof.

27. The method of claim 1, wherein the agonist of TREM2 is heat shock protein 60 (HPS60) or apopoliprotein E (ApoE).

28. (canceled)

29. The method of claim 1, wherein the disease or disorder is the cerebral form of X-linked adrenoleukodystrophy (cALD).

The application's sequence listing, which the Patent Office published only in electronic form, follows.

SEQUENCE LISTING (2781 sequences)

SEQ ID NO: 1 - protein, 230 aa, Homo sapiens
MEPLRLLILLFVTELSGAHNTTVFQGVAGQSLQVSCPYDSMKHWGRRKAWCRQLGEKGPCQRVVSTHNLWLLSFLRRWNGSTAITDDTLGGTLTITLRNLQPHDAGLYQCQSLHGSEADTLRKVLVEVLADPLDHRDAGDLWFPGESESFEDAHVEHSISRSLLEGEIPFPPTSILLLLACIFLIKILAASALWAAAWHGQKPGTHPPSELDCGHDPGYQLQTLPGLRDT

SEQ ID NO: 2 - protein, 174 aa, Homo sapiens
MEPLRLLILLFVTELSGAHNTTVFQGVAGQSLQVSCPYDSMKHWGRRKAWCRQLGEKGPCQRVVSTHNLWLLSFLRRWNGSTAITDDTLGGTLTITLRNLQPHDAGLYQCQSLHGSEADTLRKVLVEVLADPLDHRDAGDLWFPGESESFEDAHVEHSISRSLLEGEIPFPPTS

SEQ ID NO: 3 - protein, 113 aa, Homo sapiens
MGGLEPCSRLLLLPLLLAVSGLRPVQAQAQSDCSCSTVSPGVLAGIVMGDLVLTVLIALAVYFLGRLVPRGRGAAEAATRKQRITETESPYQELQGQRSDVYSDLNTQRPYYK

SEQ ID NO: 4 - protein, 234 aa, Homo sapiens
MRKTRLWGLLWMLFVSELRAATKLTEEKYELKEGQTLDVKCDYTLEKFASSQKAWQIIRDGEMPKTLACTERPSKNSHPVQVGRIILEDYHDHGLLRVRMVNLQVEDSGLYQCVIYQPPKEPHMLFDRIRLVVTKGFSGTPGSNENSTQNVYKIPPTTTKALCPLYTSPRTVTQAPPKSTADVSTPDSEINLTNVTDIIRVPVFNIVILLAGGFLSKSLVFSVLFAVTLRSFVP

SEQ ID NO: 5 - protein, 14 aa, Artificial Sequence
  Description of Artificial Sequence: Synthetic peptide
  CRDL1 Antibody ID 12G10
TLRSGINVGTYRIY

SEQ ID NO: 6 - protein, 11 aa, Artificial Sequence
  Description of Artificial Sequence: Synthetic peptide
  CDRL1 Antibody ID 26C10
SGDKLGDKYVC

SEQ ID NO: 7 - protein, 17 aa, Artificial Sequence
  Description of Artificial Sequence: Synthetic peptide
  CDRL1 Antibody ID 24C12
KSSRSVLYSSNNKNYLA

SEQ ID NO: 8 - protein, 17 aa, Artificial Sequence
  Description of Artificial Sequence: Synthetic peptide
  CDRL1 Antibody ID 24G6
KSSQSVLYSSNNKHFLA

SEQ ID NO: 9 - protein, 17 aa, Artificial Sequence
  Description of Artificial Sequence: Synthetic peptide
  CDRL1 Antibody ID 24A10
KSSHNVLYSSNNKNYLA

SEQ ID NO: 10 - protein, 11 aa, Artificial Sequence
  Description of Artificial Sequence: Synthetic peptide
  CDRL1 Antibody ID 10E3
RASQSVSSNLA

SEQ ID NO: 11 - protein, 11 aa, Artificial Sequence
  Description of Artificial Sequence: Synthetic peptide
  CDRL1 Antibody ID 25F12
RASQSVNNNLA

SEQ ID NO: 12 - protein, 12 aa, Artificial Sequence
  Description of Artificial Sequence: Synthetic peptide
  CDRL1 Antibody ID 32E3
RASQIISSNYLA

SEQ ID NO: 13 - protein, 12 aa, Artificial Sequence
  Description of Artificial Sequence: Synthetic peptide
  CDRL1 Antibody ID 24F4
RASQSVSSSYLA

SEQ ID NO: 14 - protein, 11 aa, Artificial Sequence
  Description of Artificial Sequence: Synthetic peptide
  CDRL1 Antibody ID 16B8
RASQDINSWLA

SEQ ID NO: 15 - protein, 11 aa, Artificial Sequence
  Description of Artificial Sequence: Synthetic peptide
  CDRL1 Antibody ID 4C5
RASQGISNWLA

SEQ ID NO: 16 - protein, 11 aa, Artificial Sequence
  Description of Artificial Sequence: Synthetic peptide
  CDRL1 Antibody ID 6E7
RASQGISSWLA

SEQ ID NO: 17 - protein, 11 aa, Artificial Sequence
  Description of Artificial Sequence: Synthetic peptide
  CDRL1 Antibody ID 5E3
RASQGISNYLA

SEQ ID NO: 18 - protein, 11 aa, Artificial Sequence
  Description of Artificial Sequence: Synthetic peptide
  CDRL1 Antibody ID 4G10
RASQGIRNDLG

SEQ ID NO: 19 - protein, 11 aa, Artificial Sequence
  Description of Artificial Sequence: Synthetic peptide
  CDRL2 Antibody ID 12G10
YKSDSDKQQGS

SEQ ID NO: 20 - protein, 7 aa, Artificial Sequence
  Description of Artificial Sequence: Synthetic peptide
  CDRL2 Antibody ID 26C10
QDSKRPS

SEQ ID NO: 21 - protein, 7 aa, Artificial Sequence
  Description of Artificial Sequence: Synthetic peptide
  CDRL2 Antibody ID 26C10
QDTKRPS

SEQ ID NO: 22 - protein, 7 aa, Artificial Sequence
  Description of Artificial Sequence: Synthetic peptide
  CDRL2 Antibody ID 24C12
WASTRES

SEQ ID NO: 23 - protein, 7 aa, Artificial Sequence
  Description of Artificial Sequence: Synthetic peptide
  CDRL2 Antibody ID 10E3
GASTRAT

SEQ ID NO: 24 - protein, 7 aa, Artificial Sequence
  Description of Artificial Sequence: Synthetic peptide
  CDRL2 Antibody ID 32E3
SASSRAT

SEQ ID NO: 25 - protein, 7 aa, Artificial Sequence
  Description of Artificial Sequence: Synthetic peptide
  CDRL2 Antibody ID 24F4
GASSRAT

SEQ ID NO: 26 - protein, 7 aa, Artificial Sequence
  Description of Artificial Sequence: Synthetic peptide
  CDRL2 Antibody ID 16B8
AASSLQT

SEQ ID NO: 27 - protein, 7 aa, Artificial Sequence
  Description of Artificial Sequence: Synthetic peptide
  CDRL2 Antibody ID 4C5
AASSLQV

SEQ ID NO: 28 - protein, 7 aa, Artificial Sequence
  Description of Artificial Sequence: Synthetic peptide
  CDRL2 Antibody ID 6E7
AASSLQN

SEQ ID NO: 29 - protein, 7 aa, Artificial Sequence
  Description of Artificial Sequence: Synthetic peptide
  CDRL2 Antibody ID 5E3
AASSLQS

SEQ ID NO: 30 - protein, 7 aa, Artificial Sequence
  Description of Artificial Sequence: Synthetic peptide
  CDRL2 Antibody ID 4G10
AASSLPS

SEQ ID NO: 31 - protein, 9 aa, Artificial Sequence
  Description of Artificial Sequence: Synthetic peptide
  CDRL3 Antibody ID 12G10
MIWYSSAVV

SEQ ID NO: 32 - protein, 9 aa, Artificial Sequence
  Description of Artificial Sequence: Synthetic peptide
  CDRL3 Antibody ID 26A10
QAWDSNTVV

SEQ ID NO: 33 - protein, 9 aa, Artificial Sequence
  Description of Artificial Sequence: Synthetic peptide
  CDRL3 Antibody ID 26C10
QAWDSSTVV

SEQ ID NO: 34 - protein, 9 aa, Artificial Sequence
  Description of Artificial Sequence: Synthetic peptide
  CDRL3 Antibody ID 24C12
QQYYITPIT

SEQ ID NO: 35 - protein, 9 aa, Artificial Sequence
  Description of Artificial Sequence: Synthetic peptide
  CDRL3 Antibody ID 24G6
QQYYSTPLT

SEQ ID NO: 36 - protein, 9 aa, Artificial Sequence
  Description of Artificial Sequence: Synthetic peptide
  CDRL3 Antibody 24A10
HQYYSTPCS

SEQ ID NO: 37 - protein, 9 aa, Artificial Sequence
  Description of Artificial Sequence: Synthetic peptide
  CDRL3 Antibody ID 10E3
LQDNNWPPT

SEQ ID NO: 38 - protein, 9 aa, Artificial Sequence
  Description of Artificial Sequence: Synthetic peptide
  CDRL3 Antibody ID 25F12
QQYNNWPRT

SEQ ID NO: 39 - protein, 9 aa, Artificial Sequence
  Description of Artificial Sequence: Synthetic peptide
  CDRL3 Antibody ID 32E3
QQFDSSPIT

SEQ ID NO: 40 - protein, 9 aa, Artificial Sequence
  Description of Artificial Sequence: Synthetic peptide
  CDRL3 Antibody ID 24F4
QQYDTSPFT

SEQ ID NO: 41 - protein, 9 aa, Artificial Sequence
  Description of Artificial Sequence: Synthetic peptide
  CDRL3 Antibody ID 16B8
QQSNSFPIT

SEQ ID NO: 42 - protein, 9 aa, Artificial Sequence
  Description of Artificial Sequence: Synthetic peptide
  CDRL3 Antibody ID 4C5
QQADSFPRN

SEQ ID NO: 43 - protein, 9 aa, Artificial Sequence
  Description of Artificial Sequence: Synthetic peptide
  CDRL3 Antibody ID 6E7
QQADSFPRT

SEQ ID NO: 44 - protein, 9 aa, Artificial Sequence
  Description of Artificial Sequence: Synthetic peptide
  CDRL3 Antibody ID 5E3
QQYSTYPFT

SEQ ID NO: 45 - protein, 9 aa, Artificial Sequence
  Description of Artificial Sequence: Synthetic peptide
  CDRL3 Antibody ID 4G10
LQHNSYPWT

SEQ ID NO: 46 - protein, 115 aa, Artificial Sequence
  Description of Artificial Sequence: Synthetic polypeptide
  VL Amino Acid Sequence Antibody ID 12G10
QAVPTQPSSLSASPGVLASLTCTLRSGINVGTYRIYWYQQKPGSPPQYLLRYKSDSDKQQGSGVPSRFSGSKDASANAGILLISGLQSEDEADYYCMIWYSSAVVFGGGTKLTVL

SEQ ID NO: 47 - protein, 106 aa, Artificial Sequence
  Description of Artificial Sequence: Synthetic polypeptide
  VL Amino Acid Sequence Antibody ID 26A10
SYELTQPPSVSVSPGQTASITCSGDKLGDKYVCWYQQKPGQSPVLVIYQDSKRPSGIPERFSGSNSGNTATLTISGTQAMDEADYYCQAWDSNTVVFGGGTKLTVL

SEQ ID NO: 48 - protein, 106 aa, Artificial Sequence
  Description of Artificial Sequence: Synthetic polypeptide
  VL Amino Acid Sequence Antibody ID 26C10
SFELTQPPSVSVSPGQTASITCSGDKLGDKYVCWYQQKPGQSPMLVIYQDTKRPSGIPERFSGSNSGNTATLTISGTQAMDEADYYCQAWDSSTVVFGGGTKLTVL

SEQ ID NO: 49 - protein, 106 aa, Artificial Sequence
  Description of Artificial Sequence: Synthetic polypeptide
  VL Amino Acid Sequence Antibody ID 26F2
SYELTQPPSVSVSPGQTASITCSGDKLGDKYVCWYQQKPGQSPVLVIFQDSKRPSGIPERFSGSNSGNTATLTISGTQAMDEADYYCQAWDSSTVVFGGGTKLTVL

SEQ ID NO: 50 - protein, 106 aa, Artificial Sequence
  Description of Artificial Sequence: Synthetic polypeptide
  VL Amino Acid Sequence Antibody ID 33B12
SYELTQPPSVSVSPGQTASITCSGDKLGDKYVCWYQQKPGQSPVLVIYQDSKRPSGIPERFSGSNSGNTATLTISGTQAMDEADYYCQAWDSSTVVFGGGTKLTVL

SEQ ID NO: 51 - protein, 113 aa, Artificial Sequence
  Description of Artificial Sequence: Synthetic polypeptide
  VL Amino Acid Sequence Antobody ID 24C12
GIVMTQSPDSLAVSLGERATINCKSSRSVLYSSNNKNYLAWYQQKPGQPPKVLIYWASTRESGVPDRFSGSGSGTDFTLTISSLQAEDVAVYNCQQYYITPITFGQGTRLEIK

SEQ ID NO: 52 - protein, 113 aa, Artificial Sequence
  Description of Artificial Sequence: Synthetic polypeptide
  VL Amino Acid Sequence Antibody ID 24G6
DIVMTQSPDSLAVSLGERATINCKSSQSVLYSSNNKHFLAWYQQKPGQPPKLLIYWASTRESGVPDRFSGSGSGTDFTLTISSLQAEDVAFYYCQQYYSTPLTFGGGTKVEIK

SEQ ID NO: 53 - protein, 113 aa, Artificial Sequence
  Description of Artificial Sequence: Synthetic polypeptide
  VL Amino Acid Sequence Antibody ID 24A10
DIVMTQSPDSLAVSLGERATITCKSSHNVLYSSNNKNYLAWYQQKPGQPPKLLIYWASTRESGVPDRFSGSGSGTDFTLTISSLQAEDVAVYYCHQYYSTPCSFGQGTKLEIK

SEQ ID NO: 54 - protein, 107 aa, Artificial Sequence
  Description of Artificial Sequence: Synthetic polypeptide
  VL Amino Acid Sequence Antibody ID 10E3
EIVMTQSPATLSVSPGERATLSCRASQSVSSNLAWFQQKPGQAPRLLIYGASTRATGIPARFSVSGSGTEFTLTISSLQSEDFAFYYCLQDNNWPPTFGPGTKVDIK

SEQ ID NO: 55 - protein, 107 aa, Artificial Sequence
  Description of Artificial Sequence: Synthetic polypeptide
  VL Amino Acid Sequence Antibody ID 13E7 14C12
EIVMTQSPATLSVSPGERATLSCRASQSVSSNLAWFQQKPGQAPRLLIYGASTRATGIPARFSVSGSGTEFTLTISSLQSEDFAVYYCLQDNNWPPTFGPGTKVDIK

SEQ ID NO: 56 - protein, 107 aa, Artificial Sequence
  Description of Artificial Sequence: Synthetic polypeptide
  VL Amino Acid Sequence Antibody ID 25F12
EKVMTQSPATLSVSPGERATLSCRASQSVNNNLAWYQQKPGQAPRLLIYGASTRATGIPARFSGSGSGTEFTLTISSLQSEDFAVYYCQQYNNWPRTFGQGTKVEIK

SEQ ID NO: 57 - protein, 108 aa, Artificial Sequence
  Description of Artificial Sequence: Synthetic polypeptide
  VL Amino Acid Sequence Antibody ID 25F12
EFVLTQSPGTLSLSPGERATLSCRASQIISSNYLAWYQQKPGQAPRLLIYSASSRATGIPDRFSGSGSGTDFTLTISRLEPEDFAVYYCQQFDSSPITFGRGTRLDIK

SEQ ID NO: 58 - protein, 108 aa, Artificial Sequence
  Description of Artificial Sequence: Synthetic polypeptide
  VL Amino Acid Sequence Antibody ID 24F4
EIVLTQSPGTLSLSPGERATLSCRASQSVSSSYLAWYQQKPGQAPRLLIYGASSRATGIPDRFSGSGSGTDFTLTISRLEPEDFALYYCQQYDTSPFTFGPGTKVDIK

SEQ ID NO: 59 - protein, 107 aa, Artificial Sequence
  Description of Artificial Sequence: Synthetic polypeptide
  VL Amino Acid Sequence Antibody ID 16B8
DIQMTQSPSSVSASVGDRVTVTCRASQDINSWLAWYQQKPGKAPKLLIYAASSLQTGVPSRFSGSGSGTDFTLTISSLQPEDFATYSCQQSNSFPITFGQGTRLEIK

SEQ ID NO: 60 - protein, 107 aa, Artificial Sequence
  Description of Artificial Sequence: Synthetic polypeptide
  VL Amino Acid Sequence Antibody ID 4C5
DIQMTQSPSSVSASVGDRVTITCRASQGISNWLAWYQQKPGKAPKLLIYAASSLQVGVPLRFSGSGSGTDFTLTISSLQPEDFATYYCQQADSFPRNFGQGTKLEIK

SEQ ID NO: 61 - protein, 107 aa, Artificial Sequence
  Description of Artificial Sequence: Synthetic polypeptide
  VL Amino Acid Sequence Antibody ID 6E7
DIQMTQSPSSVSASVGDRVTITCRASQGISSWLAWYQQKPGKAPKLLIYAASSLQNGVPSRFSGSGSGTDFTLTISSLQPEDFATYFCQQADSFPRTFGQGTKLEIK

SEQ ID NO: 62 - protein, 107 aa, Artificial Sequence
  Description of Artificial Sequence: Synthetic polypeptide
  VL Amino Acid Sequence Antibody ID 5E3
DIQMTQSPSSLSASVGDRVTITCRASQGISNYLAWFQQKPGKAPKSLIYAASSLQSGVPSKFSGSGSGTDFTLTISSLQPEDFATYYCQQYSTYPFTFGPGTKVDIK

SEQ ID NO: 63 - protein, 107 aa, Artificial Sequence
  Description of Artificial Sequence: Synthetic polypeptide
  Exemplary Anti-Human TREM2 Antibody Light Chain Variable Region Amino Acid Sequences - VL Amino Acid Sequence
DIQMTQSPSSLSASVGDRVTITCRASQGIRNDLGWYQQKPGNAPKRLIYAASSLPSGVPSRFSGSGSGPEFTLTISSLQPEDFATYYCLQHNSYPWTFGQGTKVEIT

SEQ ID NO: 64 - protein, 113 aa, Homo sapiens
DIVMTQSPDSLAVSLGERATINCKSSQSVLYSSNNKNYLAWYQQKPGQPPKLLIYWASTRESGVPDRFSGSGSGTDFTLTISSLQAEDVAVYYCQQYYSTPITFGQGTRLEIK

SEQ ID NO: 65 - protein, 113 aa, Homo sapiens; identical to SEQ ID NO: 64

SEQ ID NO: 66 - protein, 113 aa, Homo sapiens
DIVMTQSPDSLAVSLGERATINCKSSQSVLYSSNNKNYLAWYQQKPGQPPKLLIYWASTRESGVPDRFSGSGSGTDFTLTISSLQAEDVAVYYCQQYYSTPYTFGQGTKLEIK

SEQ ID NO: 67 - protein, 107 aa, Homo sapiens
EIVMTQSPATLSVSPGERATLSCRASQSVSSNLAWYQQKPGQAPRLLIYGASTRATGIPARFSGSGSGTEFTLTISSLQSEDFAVYYCQQYNNWPFTFGPGTKVDIK

SEQ ID NO: 68 - protein, 107 aa, Homo sapiens
EIVMTQSPATLSVSPGERATLSCRASQSVSSNLAWYQQKPGQAPRLLIYGASTRATGIPARFSGSGSGTEFTLTISSLQSEDFAVYYCQQYNNWPWTFGQGTKVEIK

SEQ ID NO: 69 - protein, 108 aa, Homo sapiens
EIVLTQSPGTLSLSPGERATLSCRASQSVSSSYLAWYQQKPGQAPRLLIYGASSRATGIPDRFSGSGSGTDFTLTISRLEPEDFAVYYCQQYGSSPITFGQGTRLEIK

SEQ ID NO: 70 - protein, 108 aa, Homo sapiens
EIVLTQSPGTLSLSPGERATLSCRASQSVSSSYLAWYQQKPGQAPRLLIYGASSRATGIPDRFSGSGSGTDFTLTISRLEPEDFAVYYCQQYGSSPFTFGPGTKVDIK

SEQ ID NO: 71 - protein, 107 aa, Homo sapiens
DIQMTQSPSSVSASVGDRVTITCRASQGISSWLAWYQQKPGKAPKLLIYAASSLQSGVPSRFSGSGSGTDFTLTISSLQPEDFATYYCQQANSFPITFGQGTRLEIK

SEQ ID NO: 72 - protein, 107 aa, Homo sapiens
DIQMTQSPSSVSASVGDRVTITCRASQGISSWLAWYQQKPGKAPKLLIYAASSLQSGVPSRFSGSGSGTDFTLTISSLQPEDFATYYCQQANSFPYTFGQGTKLEIK

SEQ ID NO: 73 - protein, 107 aa, Homo sapiens
DIQMTQSPSSLSASVGDRVTITCRASQGISNYLAWFQQKPGKAPKSLIYAASSLQSGVPSRFSGSGSGTDFTLTISSLQPEDFATYYCQQYNSYPFTFGPGTKVDIK

SEQ ID NO: 74 - protein, 107 aa, Homo sapiens
DIQMTQSPSSLSASVGDRVTITCRASQGIRNDLGWYQQKPGKAPKRLIYAASSLQSGVPSRFSGSGSGTEFTLTISSLQPEDFATYYCLQHNSYPWTFGQGTKVEIK

SEQ ID NO: 75 - protein, 116 aa, Homo sapiens
QAVLTQPASLSASPGASASLTCTLRSGINVGTYRIYWYQQKPGSPPQYLLRYKSDSDKQQGSGVPSRFSGSKDASANAGILLISGLQSEDEADYYCMIWHSSASVVFGGGTKLTVL

SEQ ID NO: 76 - protein, 107 aa, Homo sapiens
SYELTQPPSVSVSPGQTASITCSGDKLGDKYACWYQQKPGQSPVLVIYQDSKRPSGIPERFSGSNSGNTATLTISGTQAMDEADYYCQAWDSSTAVVFGGGTKLTVL

SEQ ID NO: 77 - protein, 5 aa, Artificial Sequence
  Description of Artificial Sequence: Synthetic peptide
  Exemplary Anti-Human TREM2 Antibody Heavy Chain Variable Region Amino Acid Sequences - CDRH1
SYAMS

SEQ ID NO: 78 - protein, 5 aa, Artificial Sequence
  Description of Artificial Sequence: Synthetic peptide
  CDRH1 Antibody ID 26A10
SFGMS

SEQ ID NO: 79 - protein, 5 aa, Artificial Sequence
  Description of Artificial Sequence: Synthetic peptide
  CDRH1 Antibody ID 24A10
NYAMS

SEQ ID NO: 80 - protein, 5 aa, Artificial Sequence
  Description of Artificial Sequence: Synthetic peptide
  CDRH1 Antibody ID 10E3
NYWIG

SEQ ID NO: 81 - protein, 5 aa, Artificial Sequence
  Description of Artificial Sequence: Synthetic peptide
  CDRH1 Antibody ID 13E7 14C12
SYWIG

SEQ ID NO: 82 - protein, 5 aa, Artificial Sequence
  Description of Artificial Sequence: Synthetic peptide
  CDRH1 Antibody ID 25F12
SYYWS

SEQ ID NO: 83 - protein, 5 aa, Artificial Sequence
  Description of Artificial Sequence: Synthetic peptide
  CDRH1 Antibody 16B8
NYGIS

SEQ ID NO: 84 - protein, 5 aa, Artificial Sequence
  Description of Artificial Sequence: Synthetic peptide
  CDRH1 Antibody ID 4C5
NYWIA

SEQ ID NO: 85 - protein, 5 aa, Artificial Sequence
  Description of Artificial Sequence: Synthetic peptide
  CDRH1 Antibody ID 6E7
SYWIA

SEQ ID NO: 86 - protein, 5 aa, Artificial Sequence
  Description of Artificial Sequence: Synthetic peptide
  CDRH1 Antibody ID 5E3
GYYIH

SEQ ID NO: 87 - protein, 17 aa, Artificial Sequence
  Description of Artificial Sequence: Synthetic peptide
  CDRH2 Antibody ID 12G10 24C12
AIGGGGVSTYCADSVKG

SEQ ID NO: 88 - protein, 17 aa, Artificial Sequence
  Description of Artificial Sequence: Synthetic peptide
  Exemplary Anti-Human TREM2 Antibody Heavy Chain Variable Region Amino Acid Sequences - CDRH2
YISSSSFTIYYADSVKG

SEQ ID NO: 89 - protein, 17 aa, Artificial Sequence
  Description of Artificial Sequence: Synthetic peptide
  CDRH2 Antibidy 26A10
YISKSSFTIYYADSVKG

SEQ ID NO: 90 - protein, 17 aa, Artificial Sequence
  Description of Artificial Sequence: Synthetic peptide
  CDRH2 Antibody ID24G6
AISGSGGSTYYADSVKG

SEQ ID NO: 91 - protein, 17 aa, Artificial Sequence
  Description of Artificial Sequence: Synthetic peptide
  CDRH2 Antibody ID 10E3
IIYPGDSDTRYSPSFQG

SEQ ID NO: 92 - protein, 16 aa, Artificial Sequence
  Description of Artificial Sequence: Synthetic peptide
  CDRH2 Antibody ID 25F12
EINHSGNTNYNPSLKS

SEQ ID NO: 93 - protein, 17 aa, Artificial Sequence
  Description of Artificial Sequence: Synthetic peptide
  CDRH2 Antibody ID 16B8
WISAYNGNTNYAQKLQG

SEQ ID NO: 94 - protein, 17 aa, Artificial Sequence
  Description of Artificial Sequence: Synthetic peptide
  CDRH2 Antibody 4C5
WINPYSGGTTSAQKFQG

SEQ ID NO: 95 - protein, 12 aa, Artificial Sequence
  Description of Artificial Sequence: Synthetic peptide
  CDRH3 Antibody 12G10 24C12
FYIAVAGSHFDY

SEQ ID NO: 96 - protein, 17 aa, Artificial Sequence
  Description of Artificial Sequence: Synthetic peptide
  CDRH3 Antibody ID 26A10
EGGLTMVRGVSSYGLDV

SEQ ID NO: 97 - protein, 17 aa, Artificial Sequence
  Description of Artificial Sequence: Synthetic peptide
  CDRH3 Antibody ID 26C10
EGGITMVRGVSSYGMDV

SEQ ID NO: 98 - protein, 10 aa, Artificial Sequence
  Description of Artificial Sequence: Synthetic peptide
  CDRH3 Antibody ID 24G6
AYTPMAFFDY

SEQ ID NO: 99 - protein, 7 aa, Artificial Sequence
  Description of Artificial Sequence: Synthetic peptide
  CDRH3 Antibody ID 24A10
GGWELFY

SEQ ID NO: 100 - protein, 12 aa, Artificial Sequence
  Description of Artificial Sequence: Synthetic peptide
  CDRH3 Antibody ID 10E3
RRQGIWGDALDI

SEQ ID NO: 101 - protein, 12 aa, Artificial Sequence
  Description of Artificial Sequence: Synthetic peptide
  CDRH3 Antibody ID 13E7 14C12
RRQGIWGDALDF

SEQ ID NO: 102 - protein, 16 aa, Artificial Sequence
  Description of Artificial Sequence: Synthetic peptide
  CDRH3 Antibody ID 25F12
EGYYDILTGYHDAFDI

SEQ ID NO: 103 - protein, 13 aa, Artificial Sequence
  Description of Artificial Sequence: Synthetic peptide
  CDRH3 Antibody ID 32E3
HDIIPAAPGAFDI

SEQ ID NO: 104 - protein, 13 aa, Artificial Sequence
  Description of Artificial Sequence: Synthetic peptide
  CDRH3 Antibody ID 24F4
QAIAVTGLGGFDP

SEQ ID NO: 105 - protein, 10 aa, Artificial Sequence
  Description of Artificial Sequence: Synthetic peptide
  CDRH3 Antibody ID 16B8
RGYSYGSFDY

SEQ ID NO: 106 - protein, 14 aa, Artificial Sequence
  Description of Artificial Sequence: Synthetic peptide
  CDRH3 Antibody ID 4C5
QRTFYYDSSGYFDY

SEQ ID NO: 107 - protein, 14 aa, Artificial Sequence
  Description of Artificial Sequence: Synthetic peptide
  CDRH3 Antibody ID 6E7
QRTFYYDSSDYFDY

SEQ ID NO: 108 - protein, 12 aa, Artificial Sequence
  Description of Artificial Sequence: Synthetic peptide
  CDRH3 Antibody ID 5E3
DGGYLALYGTDV

SEQ ID NO: 109 - protein, 13 aa, Artificial Sequence
  Description of Artificial Sequence: Synthetic peptide
  CDRH3 Antibody ID 4G10
QGIEVTGTGGLDV

SEQ ID NO: 110 - protein, 121 aa, Artificial Sequence
  Description of Artificial Sequence: Synthetic polypeptide
  VH Amino Acid Sequence Antibody ID 12G10 24C12
EVQLLESGGGLVQPGGSLRLSCAASGFTFSSYAMSWVRQAPGKGLEWVSAIGGGGVSTYCADSVKGRFTISRDNSKNTLYLQMNSLRAEDTAVYYCAKFYIAVAGSHFDYWGQGTLVTVSS

SEQ ID NO: 111 - protein, 126 aa, Artificial Sequence
  Description of Artificial Sequence: Synthetic polypeptide
  VH Amino Acid Sequence Antibody ID 26A10
EVQLVESGGALVQRGGSLRLSCAASRFTFSSFGMSWVRQAPGKGLEWVSYISSSSFTIYYADSVKGRFTISRDNAKNSFYLQMNSLRDEDTAVYYCAREGGLTMVRGVSSYGLDVWGQGTTVTVSS

SEQ ID NO: 112 - protein, 126 aa, Artificial Sequence
  Description of Artificial Sequence: Synthetic polypeptide
  VH Amino Acid Sequence Antibody ID 26C10
EVQLVESGGALVQPGGSLRLSCAASGFTFSSFGMSWVRQAPGKGLEWVSYISSSSFTIYYADSVKGRFTISRDNAKNSFYLQMNSLRDEDTAVYFCVREGGITMVRGVSSYGMDVWGQGTTVTVSS

SEQ ID NO: 113 - protein, 126 aa, Artificial Sequence
  Description of Artificial Sequence: Synthetic polypeptide
  VH Amino Acid Sequence Antibody ID 26F2
EVQLVESGGALVQPGGSLRLSCAASGFTFSSFGMSWVRQAPGKGLEWISYISSSSFTIYYADSVKGRFTISRDNAKNSFYLQMNSLRDEDTAVYFCAREGGITMVRGVSSYGMDVWGQGTTVTVSS

SEQ ID NO: 114 - protein, 126 aa, Artificial Sequence
  Description of Artificial Sequence: Synthetic polypeptide
  VH Amino Acid Sequence Antibody ID 33B12
EVQLVESGGALVQPGGSLRLSCAASGFTFSSFGMSWVRQAPGKGLEWVSYISKSSFTIYYADSVKGRFTISRDNAKNSFYLQMNSLRDEDTAVYYCAREGGLTMVRGVSSYGLDVWGQGTTVTVSS

SEQ ID NO: 115 - protein, 119 aa, Artificial Sequence
  Description of Artificial Sequence: Synthetic polypeptide
  VH Amino Acid Sequence Antibody ID 24G6
EVQLLESGGGLVQPGGSLRLSCAASGFTFSSYAMSWVRQAPGKGLEWVSAISGSGGSTYYADSVKGRFTISRDNSKNTLYLQMNSLRAEDTAVYYCAKAYTPMAFFDYWGQGTLVTVSS

SEQ ID NO: 116 - protein, 116 aa, Artificial Sequence
  Description of Artificial Sequence: Synthetic polypeptide
  VH Amino Acid Sequence Antibody ID 24A10
EVQVLESGGGLVQPGGSLRLSCAASGFTFSNYAMSWVRQAPGKGLEWVSAISGSGGSTYYADSVKGRFTISRDNSKNTLYLQMNSLRAEDTAVYYCAKGGWELFYWGQGTLVTVSS

SEQ ID NO: 117 - protein, 121 aa, Artificial Sequence
  Description of Artificial Sequence: Synthetic polypeptide
  VH Amino Acid Sequence Antibody ID 10E3
EVQLVQSGAEVKKPGESLMISCKGSGYSFTNYWIGWVRQMPGKGLEWMGIIYPGDSDTRYSPSFQGQVTISADKSISTAYLQWSSLKASDTAMYFCARRRQGIWGDALDIWGQGTLVTVSS

SEQ ID NO: 118 - protein, 121 aa, Artificial Sequence
  Description of Artificial Sequence: Synthetic polypeptide
  VH Amino Acid Sequence Antibody ID 13E7 14C12
EVQLVQSGAEVKKPGESLMISCKGSGYSFTSYWIGWVRQMPGKGLEWMGIIYPGDSDTRYSPSFQGQVTISADKSISTAYLQWSSLKASDTAMYFCARRRQGIWGDALDFWGQGTLVTVSS

SEQ ID NO: 119 - protein, 124 aa, Artificial Sequence
  Description of Artificial Sequence: Synthetic polypeptide
  VH Amino Acid Sequence Antibody ID 25F12
QVQLQQWGAGLLKPSETLSLTCAVYGGSFSSYYWSWIRQPPGKGLEWIGEINHSGNTNYNPSLKSRVTISVDTSKNQFSLKLSSVTAADTAVYYCAREGYYDILTGYHDAFDIWDQGTMVTVFS

SEQ ID NO: 120 - protein, 122 aa, Artificial Sequence
  Description of Artificial Sequence: Synthetic polypeptide
  VH Amino Acid Sequence Antibody ID 32E3
EVQLVQSGAEVKKPGESLKISCKGSGYSFTSYWIGWVRQMPGKGLEWMGIIYPGDSDTRYSPSFQGQVTISADKSISTAYLQWSTLKASDTAIYYCARHDIIPAAPGAFDIWGQGTMVTVSS

SEQ ID NO: 121 - protein, 122 aa, Artificial Sequence
  Description of Artificial Sequence: Synthetic polypeptide
  VH Amino Acid Sequence Antibody ID 24F4
EVQLVQSGAEVKKPGESLKISCKGSGYTFTSYWIGWVRQMPGKGLEWMGIIYPGDSDTRYSPSFQGQVTISVDKSSSTAYLQWSSLKASDTAIYYCTRQAIAVTGLGGFDPWGQGTLVTVSS

SEQ ID NO: 122 - protein, 119 aa, Artificial Sequence
  Description of Artificial Sequence: Synthetic polypeptide
  VH Amino Acid Sequence Antibody ID 16B8
QVQLVQSGAEVKKPGASVKVSCKASGYTFTNYGISWVRQAPGQGLEWMGWISAYNGNTNYAQKLQGRVTMTTDTSTSTVYMELRSLRSDDTAVYYCARRGYSYGSFDYWGQGTLVTVSS

SEQ ID NO: 123 - protein, 123 aa, Artificial Sequence
  Description of Artificial Sequence: Synthetic polypeptide
  VH Amino Acid Sequence Antibody ID 4C5
EVQLVQSGAEVKKPGESLKISCKGSGHSFTNYWIAWVRQMPGKGLEWMGIIYPGDSDTRYSPSFQGQVTISADKSISTAYLQWSSLKASDTAVYFCARQRTFYYDSSGYFDYWGQGTLVTVSS

SEQ ID NO: 124 - protein, 123 aa, Artificial Sequence
  Description of Artificial Sequence: Synthetic polypeptide
  VH Amino Acid Sequence Antibody ID 6E7
EVQLVQSGAEVKKPGESLKISCKGSGYSFTSYWIAWVRQMPGKGLEWMGIIYPGDSDTRYSPSFQGQVTISADKSISTAYLQWSSLKASDTAMYFCARQRTFYYDSSDYFDYWGQGTLVTVSS

SEQ ID NO: 125 - protein, 121 aa, Artificial Sequence
  Description of Artificial Sequence: Synthetic polypeptide
  VH Amino Acid Sequence Antibody ID 5E3
QVQLVQSGAEVKKPGASVKVSCKASGYTFTGYYIHWVRQAPGLGLEWMGWINPYSGGTTSAQKFQGRVTMTRDTSISSAYMELSRLRSDDTAVYYCARDGGYLALYGTDVWGQGTTVTVSS

SEQ ID NO: 126 - protein, 122 aa, Artificial Sequence
  Description of Artificial Sequence: Synthetic polypeptide
  VH Amino Acid Sequence Antibody ID 4G10
EVQLVQSGAEVKKPGESLKISCKGSGYSFPSYWIAWVRQMPGKGLEWMGIIYPGDSDTRYSPSFQGQVTISADKSISTAFLKWSSLKASDTAMYFCARQGIEVTGTGGLDVWGQGTTVTVSS

SEQ ID NO: 127 - protein, 125 aa, Homo sapiens
EVQLLESGGGLVQPGGSLRLSCAASGFTFSSYAMSWVRQAPGKGLEWVSAISGSGGSTYYADSVKGRFTISRDNSKNTLYLQMNSLRAEDTAVYYCAKYYDYVWGSYRYTYFDYWGQGTLVTVSS

SEQ ID NO: 128 - protein, 121 aa, Homo sapiens
EVQLVESGGGLVQPGGSLRLSCAASGFTFSSYSMNWVRQAPGKGLEWVSYISSSSSTIYYADSVKGRFTISRDNAKNSLYLQMNSLRDEDTAVYYCARLTGYYYYYGMDVWGQGTTVTVSS

SEQ ID NO: 129 - protein, 122 aa, Homo sapiens
EVQLLESGGGLVQPGGSLRLSCAASGFTFSSYAMSWVRQAPGKGLEWVSAISGSGGSTYYADSVKGRFTISRDNSKNTLYLQMNSLRAEDTAVYYCAKAYCGGDCYSYFDYWGQGTLVTVSS

SEQ ID NO: 130 - protein, 120 aa, Homo sapiens
EVQLLESGGGLVQPGGSLRLSCAASGFTFSSYAMSWVRQAPGKGLEWVSAISGSGGSTYYADSVKGRFTISRDNSKNTLYLQMNSLRAEDTAVYYCAKGTTGTAEYFQHWGQGTLVTVSS

SEQ ID NO: 131 - protein, 118 aa, Homo sapiens
EVQLVQSGAEVKKPGESLKISCKGSGYSFTSYWIGWVRQMPGKGLEWMGIIYPGDSDTRYSPSFQGQVTISADKSISTAYLQWSSLKASDTAMYYCARGTTGTYFDYWGQGTLVTVSS

SEQ ID NO: 132 - protein, 118 aa, Homo sapiens
QVQLQQWGAGLLKPSETLSLTCAVYGGSFSGYYWSWIRQPPGKGLEWIGEINHSGSTNYNPSLKSRVTISVDTSKNQFSLKLSSVTAADTAVYYCARYNWNDDAFDIWGQGTMVTVSS

SEQ ID NO: 133 - protein, 121 aa, Homo sapiens
EVQLVQSGAEVKKPGESLKISCKGSGYSFTSYWIGWVRQMPGKGLEWMGIIYPGDSDTRYSPSFQGQVTISADKSISTAYLQWSSLKASDTAMYYCARVDIVATIDAFDIWGQGTMVTVSS

SEQ ID NO: 134 - protein, 121 aa, Homo sapiens
EVQLVQSGAEVKKPGESLKISCKGSGYSFTSYWIGWVRQMPGKGLEWMGIIYPGDSDTRYSPSFQGQVTISADKSISTAYLQWSSLKASDTAMYYCARVDIVATINWFDPWGQGTLVTVSS

SEQ ID NO: 135 - protein, 119 aa, Homo sapiens
QVQLVQSGAEVKKPGASVKVSCKASGYTFTSYGISWVRQAPGQGLEWMGWISAYNGNTNYAQKLQGRVTMTTDTSTSTAYMELRSLRSDDTAVYYCARYSGSYYYFDYWGQGTLVTVSS

SEQ ID NO: 136 - protein, 119 aa, Homo sapiens
EVQLVQSGAEVKKPGESLKISCKGSGYSFTSYWIGWVRQMPGKGLEWMGIIYPGDSDTRYSPSFQGQVTISADKSISTAYLQWSSLKASDTAMYYCARYSGSYYYFDYWGQGTLVTVSS

SEQ ID NO: 137 - protein, 123 aa, Homo sapiens
QVQLVQSGAEVKKPGASVKVSCKASGYTFTGYYMHWVRQAPGQGLEWMGWINPNSGGTNYAQKFQGRVTMTRDTSISTAYMELSRLRSDDTAVYYCARDYGDYYYYYYGMDVWGQGTTVTVSS

SEQ ID NO: 138 - protein, 125 aa, Homo sapiens
EVQLVQSGAEVKKPGESLKISCKGSGYSFTSYWIGWVRQMPGKGLEWMGIIYPGDSDTRYSPSFQGQVTISADKSISTAYLQWSSLKASDTAMYYCARVDIVATIYYYYYGMDVWGQGTTVTVSS

SEQ ID NO: 139 - protein, 7 aa, Artificial Sequence
  Description of Artificial Sequence: Synthetic peptide
  CDRL2 Consensus for 6E7 improved Affinity variants
  MOD_RES (1)..(1): A or G
  MOD_RES (5)..(5): L or R
  MOD_RES (7)..(7): N, K, R, L, or T
XASSXQX

SEQ ID NO: 140 - protein, 9 aa, Artificial Sequence
  Description of Artificial Sequence: Synthetic peptide
  CDRL3 Consensus for 6E7 improved Affinity variants
  MOD_RES (1)..(1): Q or G
  MOD_RES (5)..(5): S or R
  MOD_RES (6)..(6): F, L or Y
  MOD_RES (8)..(8): R or H
XQADXXPXT

SEQ ID NO: 141 - protein, 17 aa, Artificial Sequence
  Description of Artificial Sequence: Synthetic peptide
  CDRH2 Consensus for 6E7 improved Affinity variants
  MOD_RES (1)..(1): I or T
  MOD_RES (9)..(9): T or V
  MOD_RES (11)..(11): Y or L
  MOD_RES (12)..(12): S or A
  MOD_RES (14)..(14): S, G, or E
  MOD_RES (17)..(17): G or D
XIYPGDSDXRXXPXFQX

SEQ ID NO: 142 - protein, 14 aa, Artificial Sequence
  Description of Artificial Sequence: Synthetic peptide
  CDRH3 Consensus for 6E7 improved Affinity variants
  MOD_RES (1)..(1): Q, G, S, or M
  MOD_RES (12)..(12): F or S
XRTFYYDSSDYXDY

SEQ ID NO: 143 - protein, 7 aa, Artificial Sequence
  Description of Artificial Sequence: Synthetic peptide
  CDRL2 Antibody ID V3
AASSRQN

SEQ ID NO: 144 - protein, 7 aa, Artificial Sequence
  Description of Artificial Sequence: Synthetic peptide
  CDRL2 Antibody ID V24 C01
AASSLQK

SEQ ID NO: 145 - protein, 7 aa, Artificial Sequence
  Description of Artificial Sequence: Synthetic peptide
  CDRL2 Antibody ID V27 C04
AASSLQR

SEQ ID NO: 146 - protein, 7 aa, Artificial Sequence
  Description of Artificial Sequence: Synthetic peptide
  CDRL2 Anitbody ID V40 D05
AASSLQL

SEQ ID NO: 147 - protein, 7 aa, Artificial Sequence
  Description of Artificial Sequence: Synthetic peptide
  CDRL2 Antibody ID V84 H01
GASSLQN

SEQ ID NO: 148 - protein, 9 aa, Artificial Sequence
  Description of Artificial Sequence: Synthetic peptide
  CDRL3 Antibody ID V40 D05
QQADRFPRT

SEQ ID NO: 149 - protein, 9 aa, Artificial Sequence
  Description of Artificial Sequence: Synthetic peptide
  CDRL3 Antibody ID V24 C01
QQADSFPHT

SEQ ID NO: 150 - protein, 9 aa, Artificial Sequence
  Description of Artificial Sequence: Synthetic peptide
  CDRL3 Antibody ID V48 E01
QQADSLPRT

SEQ ID NO: 151 - protein, 9 aa, Artificial Sequence
  Description of Artificial Sequence: Synthetic peptide
  CDRL3 Antibody ID V49 E02 V73 G02
QQADSYPRT

SEQ ID NO: 152 - protein, 9 aa, Artificial Sequence
  Description of Artificial Sequence: Synthetic peptide
  CDRL3 Antibody ID V60 F01
GQADSFPRT

SEQ ID NO: 153 - protein, 107 aa, Artificial Sequence
  Description of Artificial Sequence: Synthetic polypeptide
  VL Amino Acid Sequence Antibody ID V3
DIQMTQSPSSVSASVGDRVTITCRASQGISSWLAWYQQKPGKAPKLLIYAASSRQNGVPSRFSGSGSGTDFTLTISSLQPEDFATYFCQQADRFPRTFGQGTKLEIK

SEQ ID NO: 154 - protein, 107 aa, Artificial Sequence
  Description of Artificial Sequence: Synthetic polypeptide
  VL Amino Acid Sequence Antibody ID V24 C01
DIQMTQSPSSVSASVGDRVTITCRASQGISSWLAWYQQKPGKAPKLLIYAASSLQKGVPSRFSGSGSGTDFTLTISSLQPEDFATYFCQQADSFPHTFGQGTKLEIK

SEQ ID NO: 155 - protein, 107 aa, Artificial Sequence
  Description of Artificial Sequence: Synthetic polypeptide
  VL Amino Acid Sequence Antibody ID V27 C04
DIQMTQSPSSVSASVGDRVTITCRASQGISSWLAWYQQKPGKAPKLLIYAASSLQRGVPSRFSGSGSGTDFTLTISSLQPEDFATYFCQQADSFPRTFGQGTKLEIK

SEQ ID NO: 156 - protein, 107 aa, Artificial Sequence
  Description of Artificial Sequence: Synthetic polypeptide
  VL Amino Acid Sequence Antibody ID V40 D05
DIQMTQSPSSVSASVGDRVTITCRASQGISSWLAWYQQKPGKAPKLLIYAASSLQLGVPSRFSGSGSGTDFTLTISSLQPEDFATYFCQQADRFPRTFGQGTKLEIK

SEQ ID NO: 157 - protein, 107 aa, Artificial Sequence
  Description of Artificial Sequence: Synthetic polypeptide
  VL Amino Acid Sequence Antibody ID V48 E01
DIQMTQSPSSVSASVGDRVTITCRASQGISSWLAWYQQKPGKAPKLLIYAASSLQTGVPSRFSGSGSGTDFTLTISSLQPEDFATYFCQQADSLPRTFGQGTKLEIK

SEQ ID NO: 158 - protein, 107 aa, Artificial Sequence
  Description of Artificial Sequence: Synthetic polypeptide
  VL Amino Acid Sequence Antibody ID V49 E02 V73 G02
DIQMTQSPSSVSASVGDRVTITCRASQGISSWLAWYQQKPGKAPKLLIYAASSRQNGVPSRFSGSGSGTDFTLTISSLQPEDFATYFCQQADSYPRTFGQGTKLEIK

SEQ ID NO: 159 - protein, 107 aa, Artificial Sequence
  Description of Artificial Sequence: Synthetic polypeptide
  VL Amino Acid Sequence Antibody ID V52 E05
DIQMTQSPSSVSASVGDRVTITCRASQGISSWLAWYQQKPGKAPKLLIYAASSLQRGVPSRFSGSGSGTDFTLTISSLQPEDFATYFCQQADRFPRTFGQGTKLEIK

SEQ ID NO: 160 - protein, 107 aa, Artificial Sequence
  Description of Artificial Sequence: Synthetic polypeptide
  VL Amino Acid Sequence Antibody ID V60 F01
DIQMTQSPSSVSASVGDRVTITCRASQGISSWLAWYQQKPGKAPKLLIYAASSLQRGVPSRFSGSGSGTDFTLTISSLQPEDFATYFCGQADSFPRTFGQGTKLEIK

SEQ ID NO: 161 - protein, 107 aa, Artificial Sequence
  Description of Artificial Sequence: Synthetic polypeptide
  VL Amino Acid Sequence Antibody ID V76 G05
DIQMTQSPSSVSASVGDRVTITCRASQGISSWLAWYQQKPGKAPKLLIYAASSLQKGVPSRFSGSGSGRDFTLTISSLQPEDFATYFCQQADSFPRTFGQGTKLEIK

SEQ ID NO: 162 - protein, 107 aa, Artificial Sequence
  Description of Artificial Sequence: Synthetic polypeptide
  VL Amino Acid Sequence Antibody ID V84 H01
DIQMTQSPSSVSASVGDRVTITCRASQGISSWLAWYQQKPGKAPKLLIYGASSLQNGVPSRFSGSGSGTDFTLTISSLQPEDFATYFCQQADSFPRTFGQGTKLEIK

SEQ ID NO: 163 - protein, 4 aa, Artificial Sequence
  Description of Artificial Sequence: Synthetic peptide
  FR1/CDRH1 border Antibody ID 6E7
YSFT

SEQ ID NO: 164 - protein, 4 aa, Artificial Sequence
  Description of Artificial Sequence: Synthetic peptide
  Heavy Chain Variable Region Amino Acid Sequences for Reduced Affinity TREM2 Antibodies - FR1/CDRH1 border
YSFA

SEQ ID NO: 165 - protein, 4 aa, Artificial Sequence
  Description of Artificial Sequence: Synthetic peptide
  FR1/CDRH1 border Antibody ID V3 A04
YSFG

SEQ ID NO: 166 - protein, 4 aa, Artificial Sequence
  Description of Artificial Sequence: Synthetic peptide
  FR1/CDRH1 border Antibody ID V49 E02
YSFN

SEQ ID NO: 167 - protein, 4 aa, Artificial Sequence
  Description of Artificial Sequence: Synthetic peptide
  FR1/CDRH1 border Antibody ID V52 E05
YSFE

SEQ ID NO: 168 - protein, 4 aa, Artificial Sequence
  Description of Artificial Sequence: Synthetic peptide
  FR1/CDRH1 border Antibody ID V60 F01
YHFT

SEQ ID NO: 169 - protein, 4 aa, Artificial Sequence
  Description of Artificial Sequence: Synthetic peptide
  FR1/CDRH1 border Antibody ID V76 G05 V84 H01
YGFT

SEQ ID NO: 170 - protein, 17 aa, Artificial Sequence
  Description of Artificial Sequence: Synthetic peptide
  CDRH2 Antibody ID 6E7 V3 A04
IIYPGDSDTRYSPSFQD

SEQ ID NO: 171 - protein, 17 aa, Artificial Sequence
  Description of Artificial Sequence: Synthetic peptide
  CDRH2 Antibody ID V24 C01
IIYPGDSDVRYSPSFQG

SEQ ID NO: 172 - protein, 17 aa, Artificial Sequence
  Description of Artificial Sequence: Synthetic peptide
  CDRH2 Antibody ID V27 C04
IIYPGDSDTRYAPSFQG

SEQ ID NO: 173 - protein, 17 aa, Artificial Sequence
  Description of Artificial Sequence: Synthetic peptide
  CDRH2 Antibody ID V49 E02
TIYPGDSDTRLSPSFQG

SEQ ID NO: 174 - protein, 17 aa, Artificial Sequence
  Description of Artificial Sequence: Synthetic peptide
  CDRH2 Antibody ID V73 G02
IIYPGDSDTRYSPGFQG

SEQ ID NO: 175 - protein, 17 aa, Artificial Sequence
  Description of Artificial Sequence: Synthetic peptide
  CDRH2 Antibody ID V76 G05
IIYPGDSDTRYSPEFQG

SEQ ID NO: 176 - protein, 14 aa, Artificial Sequence
  Description of Artificial Sequence: Synthetic peptide
  CDRH3 Antibody ID V3 A04
GRTFYYDSSDYFDY

SEQ ID NO: 177 - protein, 14 aa, Artificial Sequence
  Description of Artificial Sequence: Synthetic peptide
  CDRH3 Antibody ID V24 C01
SRTFYYDSSDYFDY

SEQ ID NO: 178 - protein, 14 aa, Artificial Sequence
  Description of Artificial Sequence: Synthetic peptide
  CDRH3 Antibody ID V60 F01
QRTFYYDSSDYSDY

SEQ ID NO: 179 - protein, 14 aa, Artificial Sequence
  Description of Artificial Sequence: Synthetic peptide
  CDRH3 Antibody ID V48 E01
MRTFYYDSSDYFDY

SEQ ID NO: 180 - protein, 123 aa, Artificial Sequence
  Description of Artificial Sequence: Synthetic polypeptide
  VH Amino Acid Sequence Antibody ID V3 A04
EVQLVQSGAEVKKPGESLKISCKGSGYSFASYWIAWVRQMPGKGLEWMGIIYPGDSDTRYSPSFQDQVTISADKSISTAYLQWSSLKASDTAMYFCARGRTFYYDSSDYFDYWGQGTLVTVSS

SEQ ID NO: 181 - protein, 123 aa, Artificial Sequence
  Description of Artificial Sequence: Synthetic polypeptide
  VH Amino Acid Sequence Antibody ID V24 C01
EVQLVQSGAEVKKPGESLKISCKGSGYSFTSYWIAWVRQMPGKGLEWMGIIYPGDSDVRYSPSFQGQVTISADKSISTAYLQWSSLKASDTAMYFCARSRTFYYDSSDYFDYWGQGTLVTVSS

SEQ ID NO: 182 - protein, 123 aa, Artificial Sequence
  Description of Artificial Sequence: Synthetic polypeptide
  VH Amino Acid Sequence Antibody ID V27 C04
EVQLVQSGAEVKKPGESLKISCKGSGYSFTSYWIAWVRQMPGKGLEWMGIIYPGDSDTRYAPSFQGQVTISADKSISTAYLQWSSLKASDTAMYFCVRSRTFYYDSSDYFDYWGQGTLVTVSS

SEQ ID NO: 183 - protein, 123 aa, Artificial Sequence
  Description of Artificial Sequence: Synthetic polypeptide
  VH Amino Acid Sequence Antibody ID V40 D05
EVQLVQSGAEVKKPGESLKISCKGSGYSFGSYWIAWVRQMPGKGLEWMGIIYPGDSDVRYSPSFQGQVTISADKSISTAYLQWSSLKASDTAMYFCARQRTFYYDSSDYSDYWGQGTLVTVSS

SEQ ID NO: 184 - protein, 123 aa, Artificial Sequence
  Description of Artificial Sequence: Synthetic polypeptide
  VH Amino Acid Sequence Antibody ID V48 E01
EVQLVQSGAEVKKPGESLKISCKGSGYSFGSYWIAWVRQMPGKGLEWMGIIYPGDSDVRYSPSFQGQVTISADKSISTAYLQWSSLKASDTAMYFCARMRTFYYDSSDYFDYWGQGTLVTVSS

SEQ ID NO: 185 - protein, 123 aa, Artificial Sequence
  Description of Artificial Sequence: Synthetic polypeptide
  Heavy Chain Variable Region Amino Acid Sequences for Improved Affinity TREM2 Antibodies - VH Amino Acid Sequence
EVQLVQSGAEVKKPGESLKISCKGSGYSFNSYWIAWVRQMPGKGLEWMGTIYPGDSDTRLSPSFQGQVTISADKSISTAYLQWSSLKASDTAMYFCARSRTFYYDSSDYFDYWGQGTLVTVSS

SEQ ID NO: 186 - protein, 123 aa, Artificial Sequence
  Description of Artificial Sequence: Synthetic polypeptide
  VH Amino Acid Sequence Antibody ID V49 E02
EVQLVQSGAEVKKPGESLKISCKGSGYSFESYWIAWVRQMPGKGLEWMGIIYPGDSDTRYSPSFQGQVTISADKSISTAYLQWSSLKASDTAMYFCARGRTFYYDSSDYFDYWGQGTLVTVSS

SEQ ID NO: 187 - protein, 123 aa, Artificial Sequence
  Description of Artificial Sequence: Synthetic polypeptide
  VH Amino Acid Sequence Antibody ID V60 F01
EVQLVQSGAEVKKPGESLKISCKGSGYHFTSYWIAWVRQMPGKGLEWMGIIYPGDSDVRYSPSFQGQVTISADKSISTAYLQWSSLKASDTAMYFCARQRTFYYDSSDYSDYWGQGTLVTVSS

SEQ ID NO: 188 - protein, 123 aa, Artificial Sequence
  Description of Artificial Sequence: Synthetic polypeptide
  VH Amino Acid Sequence Antibody ID V73 G02
EVQLVQSGAEVKKPGESLKISCKGSGYSFGSYWIAWVRQMPGKGLEWMGIIYPGDSDTRYSPGFQGQVTISADKSISTAYLQWSSLKASDTAMYFCARGRTFYYDSSDYFDYWGQGTLVTVSS

SEQ ID NO: 189 - protein, 123 aa, Artificial Sequence
  Description of Artificial Sequence: Synthetic polypeptide
  VH Amino Acid Sequence Antibody ID V76 G05
EVQLVQSGAEVKKPGESLKISCKGSGYSFGSYWIAWVRQMPGKGLEWMGIIYPGDSDTRYSPEFQGQVTISADKSISTAYLQWSSLKASDTAMYFCARQRTFYYDSSDYSDYWGQGTLVTVSS

SEQ ID NO: 190 - protein, 123 aa, Artificial Sequence
  Description of Artificial Sequence: Synthetic polypeptide
  VH Amino Acid Sequence Antibody ID V84 H01
EVQLVQSGAEVKKPGESLKISCKGSGYGFTSYWIAWVRQMPGKGLEWMGIIYPGDSDTRYSPSFQGQVTISADKSISTAYLQWSSLKASDTAMYFCARQRTFYYDSSDYSDYWGQGTLVTVSS

SEQ ID NO: 191 - protein, 106 aa, Homo sapiens
GQPKANPTVTLFPPSSEELQANKATLVCLISDFYPGAVTVAWKADGSPVKAGVETTKPSKQSNNKYAASSYLSLTPEQWKSHRSYSCQVTHEGSTVEKTVAPTECS

SEQ ID NO: 192 - protein, 106 aa, Homo sapiens
GQPKAAPSVTLFPPSSEELQANKATLVCLISDFYPGAVTVAWKADSSPVKAGVETTTPSKQSNNKYAASSYLSLTPEQWKSHRSYSCQVTHEGSTVEKTVAPTECS

SEQ ID NO: 193 - protein, 105 aa, Homo sapiens
QPKAAPSVTLFPPSSEELQANKATLVCLISDFYPGAVTVAWKADSSPVKAGVETTTPSKQSNNKYAASSYLSLTPEQWKSHRSYSCQVTHEGSTVEKTVAPTECS

SEQ ID NO: 194 - protein, 106 aa, Homo sapiens
GQPKAAPSVTLFPPSSEELQANKATLVCLISDFYPGAVTVAWKADSSPVKAGVETTTPSKQSNNKYAASSYLSLTPEQWKSHKSYSCQVTHEGSTVEKTVAPTECS

SEQ ID NO: 195 - protein, 106 aa, Homo sapiens
GQPKAAPSVTLFPPSSEELQANKATLVCLVSDFYPGAVTVAWKADGSPVKVGVETTKPSKQSNNKYAASSYLSLTPEQWKSHRSYSCRVTHEGSTVEKTVAPAECS

SEQ ID NO: 196 - protein, 106 aa, Homo sapiens
TVAAPSVFIFPPSDEQLKSGTASVVCLLNNFYPREAKVQWKVDNALQSGNSQESVTEQDSKDSTYSLSSTLTLSKADYEKHKVYACEVTHQGLSSPVTKSFNRGEC

SEQ ID NO: 197 - protein, 107 aa, Homo sapiens [sequence omitted]

SEQ ID NO: 198 - protein, 330 aa, Homo sapiens
ASTKGPSVFPLAPSSKSTSGGTAALGCLVKDYFPEPVTVSWNSGALTSGVHTFPAVLQSSGLYSLSSVVTVPSSSLGTQTYICNVNHKPSNTKVDKKVEPKSCDKTHTCPPCPAPELLGGPSVFLFPPKPKDTLMISRTPEVTCVVVDVSHEDPEVKFNWYVDGVEVHNAKTKPREEQYNSTYRVVSVLTVLHQDWLNGKEYKCKVSNKALPAPIEKTISKAKGQPREPQVYTLPPSREEMTKNQVSLTCLVKGFYPSDIAVEWESNGQPENNYKTTPPVLDSDGSFFLYSKLTVDKSRWQQGNVFSCSVMHEALHNHYTQKSLSLSPGK

SEQ ID NO: 199 - protein, 330 aa, Homo sapiens [sequence omitted]

SEQ ID NO: 200 - protein, 330 aa, Homo sapiens
ASTKGPSVFPLAPSSKSTSGGTAALGCLVKDYFPEPVTVSWNSGALTSGVHTFPAVLQSSGLYSLSSVVTVPSSSLGTQTYICNVNHKPSNTKVDKRVEPKSCDKTHTCPPCPAPELLGGPSVFLFPPKPKDTLMISRTPEVTCVVVDVSHEDPEVKFNWYVDGVEVHNAKTKPREEQYNSTYRVVSVLTVLHQDWLNGKEYKCKVSNKALPAPIEKTISKAKGQPREPQVYTLPPSREEMTKNQVSLTCLVKGFYPSDIAVEWESNGQPENNYKTTPPVLDSDGSFFLYSKLTVDKSRWQQGNVFSCSVMHEALHNHYTQKSLSLSPGK

SEQ ID NO: 201 - protein, 330 aa, Homo sapiens
ASTKGPSVFPLAPSSKSTSGGTAALGCLVKDYFPEPVTVSWNSGALTSGVHTFPAVLQSSGLYSLSSVVTVPSSSLGTQTYICNVNHKPSNTKVDKRVEPKSCDKTHTCPPCPAPELLGGPSVFLFPPKPKDTLMISRTPEVTCVVVDVSHEDPEVKFNWYVDGVEVHNAKTKPREEQYNSTYRVVSVLTVLHQDWLNGKEYKCKVSNKALPAPIEKTISKAKGQPREPQVYTLPPSRDELTKNQVSLTCLVKGFYPSDIAVEWESNGQPENNYKTTPPVLDSDGSFFLYSKLTVDKSRWQQGNVFSCSVMHEALHNHYTQKSLSLSPGK

SEQ ID NO: 202 - protein, 330 aa, Homo sapiens
ASTKGPSVFPLAPSSKSTSGGTAALGCLVKDYFPEPVTVSWNSGALTSGVHTFPAVLQSSGLYSLSSVVTVPSSSLGTQTYICNVNHKPSNTKVDKKVEPKSCDKTHTCPPCPAPELLGGPSVFLFPPKPKDTLMISRTPEVTCVVVDVSHEDPEVKFNWYVDGVEVHNAKTKPREEQYGSTYRVVSVLTVLHQDWLNGKEYKCKVSNKALPAPIEKTISKAKGQPREPQVYTLPPSREEMTKNQVSLTCLVKGFYPSDIAVEWESNGQPENNYKTTPPVLDSDGSFFLYSKLTVDKSRWQQGNVFSCSVMHEALHNHYTQKSLSLSPGK

SEQ ID NO: 203 - protein, 330 aa, Homo sapiens
ASTKGPSVFPLAPSSKSTSGGTAALGCLVKDYFPEPVTVSWNSGALTSGVHTFPAVLQSSGLYSLSSVVTVPSSSLGTQTYICNVNHKPSNTKVDKKVEPKSCDKTHTCPPCPAPELLGGPSVFLFPPKPKDTLMISRTPEVTCVVVDVSHEDPEVKFNWYVDGVEVHNAKTKPCEEQYGSTYRCVSVLTVLHQDWLNGKEYKCKVSNKALPAPIEKTISKAKGQPREPQVYTLPPSREEMTKNQVSLTCLVKGFYPSDIAVEWESNGQPENNYKTTPPVLDSDGSFFLYSKLTVDKSRWQQGNVFSCSVMHEALHNHYTQKSLSLSPGK

SEQ ID NO: 204 - protein, 326 aa, Homo sapiens
ASTKGPSVFPLAPCSRSTSESTAALGCLVKDYFPEPVTVSWNSGALTSGVHTFPAVLQSSGLYSLSSVVTVPSSNFGTQTYTCNVDHKPSNTKVDKTVERKCCVECPPCPAPPVAGPSVFLFPPKPKDTLMISRTPEVTCVVVDVSHEDPEVQFNWYVDGVEVHNAKTKPREEQFNSTFRVVSVLTVVHQDWLNGKEYKCKVSNKGLPAPIEKTISKTKGQPREPQVYTLPPSREEMTKNQVSLTCLVKGFYPSDIAVEWESNGQPENNYKTTPPMLDSDGSFFLYSKLTVDKSRWQQGNVFSCSVMHEALHNHYTQKSLSLSPGK

SEQ ID NO: 205 - protein, 330 aa, Homo sapiens; identical to SEQ ID NO: 203

SEQ ID NO: 206 - protein, 12 aa, Homo sapiens
ERKCCVECPPCP

SEQ ID NO: 207 - protein, 110 aa, Homo sapiens
ASTKGPSVFPLAPCSRSTSESTAALGCLVKDYFPEPVTVSWNSGALTSGVHTFPAVLQSSGLYSLSSVVTVPSSNFGTQTYTCNVDHKPSNTKVDKTVERKCCVECPPCP

SEQ ID NO: 208 - DNA, 345 bp, Artificial Sequence
  Description of Artificial Sequence: Synthetic polynucleotide
  Anti-TREM2 Antibody Variable Region Nucleic Acid - LV Antibody ID 12G10
caggctgtgccgactcagccgtcttccctctctgcatctcctggagtattagccagtctcacctgcaccttacgcagtggcatcaatgttggtacctacaggatatactggtaccagcagaagccagggagtcctccccagtatctcctgaggtacaaatcagactcagataagcagcagggctctggagtccccagccgcttctctggatccaaggatgcttcggccaatgcagggattttactcatctctgggctccagtctgaggatgaggctgactattactgtatgatttggtacagcagtgctgtggtattcggcggagggaccaaactgaccgtccta

SEQ ID NO: 209 - DNA, 318 bp, Artificial Sequence
  Description of Artificial Sequence: Synthetic polynucleotide
  Anti-TREM2 Antibody Variable Region Nucleic Acid - LV Antibody ID 26A10
tcctatgagctgactcagccaccctcagtgtccgtgtccccaggacagacagccagcatcacctgctctggagataaattgggagataagtatgtttgctggtatcagcagaagccaggccagtcccctgtgctggtcatctatcaagatagcaagcggccctcagggatccctgagcgattctctggctccaactctgggaacacagccactctgaccatcagcgggacccaggctatggatgaggctgactattactgtcaggcgtgggacagtaacactgtggtattcggcggagggaccaagctgaccgtccta

SEQ ID NO: 210 - DNA, 318 bp, Artificial Sequence
  Description of Artificial Sequence: Synthetic polynucleotide
  Anti-TREM2 Antibody Variable Region Nucleic Acid - LV Antibody ID 26C10
tcctttgagctgactcagccaccctcagtgtccgtgtccccaggacagacagccagcatcacctgctctggagataaattgggggataagtatgtttgctggtatcagcagaagccaggccagtcccctatgttggtcatctatcaagataccaagcggccctcagggatccctgaacgattctctggctccaactctgggaacacagccactctgaccatcagcgggacccaggctatggatgaggctgactattactgtcaggcgtgggacagcagcactgtggtcttcggcggagggaccaagctgaccgtccta

SEQ ID NO: 211 - DNA, 318 bp, Artificial Sequence
  Description of Artificial Sequence: Synthetic polynucleotide
  Anti-TREM2 Antibody Variable Region Nucleic Acid - LV Antibody ID 26F2
tcctatgagctgactcagccaccctcagtgtccgtgtccccaggacagacagccagcatcacctgctctggagataaattgggggataagtatgtttgctggtatcagcagaagccaggccagtcccctgtgttggtcatctttcaagatagcaagcggccctcagggatccctgagcgattctctggctccaactctgggaacacagccactctgaccatcagcgggacccaggctatggatgaggctgactattactgtcaggcgtgggacagcagcactgtggtattcggcggagggaccaagctgaccgtccta

SEQ ID NO: 212 - DNA, 318 bp, Artificial Sequence
  Description of Artificial Sequence: Synthetic polynucleotide
  Anti-TREM2 Antibody Variable Region Nucleic Acid - LV Antibody ID 33B12
tcctatgagctgactcagccaccctcagtgtccgtgtccccaggacagacagccagcatcacctgctctggagataaattgggggataagtatgtttgctggtatcagcagaagccaggccagtcccctgtgttggtcatctatcaagatagcaagcggccctcagggatccctgagcgattctctggctccaactctgggaacacagccactctgaccatcagcgggacccaggctatggatgaggctgactattactgtcaggcgtgggacagtagcactgtggtattcggcggagggaccaagctgaccgtccta

SEQ ID NO: 213 - DNA, 339 bp, Artificial Sequence
  Description of Artificial Sequence: Synthetic polynucleotide
  Anti-TREM2 Antibody Variable Region Nucleic Acid - LV Antibody ID 24C12
ggcatcgtgatgacccagtctccagactccctggctgtgtctctgggcgagagggccaccatcaactgcaagtccagccggagtgttttgtacagctccaacaataagaactacttagcttggtaccagcagaaaccaggacagcctcctaaggtgctcatttactgggcatctacccgggaatccggggtccctgaccgattcagtggcagcgggtctgggacagatttcactctcaccatcagcagcctgcaggctgaagatgtggcagtttataactgtcagcaatattatattactccgatcaccttcggccaagggacacgactggagattaaa

SEQ ID NO: 214 - DNA, 339 bp, Artificial Sequence
  Description of Artificial Sequence: Synthetic polynucleotide
  Anti-TREM2 Antibody Variable Region Nucleic Acid - LV Antibody ID 24G6
gacatcgtgatgacccagtctccagactccctggctgtgtctctgggcgagagggccaccatcaactgcaagtccagccagagtgttttatacagctccaacaataagcacttcttagcttggtaccagcagaaaccaggacagcctcctaagctgctcatttactgggcatctacccgggagtccggggtccctgaccgattcagtggcagcgggtctgggacagatttcactctcaccatcagcagcctgcaggctgaagatgtggcattttattactgtcagcaatattatagtactccgctcactttcggcggagggaccaaggtggagatcaaa

SEQ ID NO: 215 - DNA, 339 bp, Artificial Sequence
  Description of Artificial Sequence: Synthetic polynucleotide
  Anti-TREM2 Antibody Variable Region Nucleic Acid - LV Antibody 24A10
gacatcgtgatgacccagtctccagactccctggctgtgtctctgggcgagagggccaccatcacctgcaagtccagccacaatgttttatacagctccaacaataagaactacttagcttggtatcagcagaaaccaggacagcctcctaaactgctcatttactgggcatctacccgggaatccggggtccctgaccgattcagtggcagcgggtctgggacagatttcactctcaccatcagcagcctgcaggctgaagatgtggcagtttattactgtcaccaatattatagtactccgtgcagttttggccaggggaccaagctggagatcaaa

SEQ ID NO: 216 - DNA, 321 bp, Artificial Sequence
  Description of Artificial Sequence: Synthetic polynucleotide
  Anti-TREM2 Antibody Variable Region Nucleic Acid - LV Antibody ID 10E3
gaaatagtgatgacgcagtctccagccaccctgtctgtgtctccaggggaaagagccaccctctcctgcagggccagtcagagtgttagcagcaacttagcctggttccagcagaaacctggccaggctcccaggctcctcatctatggtgcttccaccagggccactggtattccagccaggttcagtgtcagtgggtctgggacagagttcactctcaccatcagcagcctgcagtctgaagattttgcattttattactgtctgcaggataataattggcctcccactttcggccctgggaccaaagtggatatcaaa

SEQ ID NO: 217 - DNA, 321 bp, Artificial Sequence
  Description of Artificial Sequence: Synthetic polynucleotide
  Anti-TREM2 Antibody Variable Region Nucleic Acid - LV Antibody ID 13E7
gaaatagtgatgacgcagtctccagccaccctgtctgtgtctccaggggaaagagccaccctctcctgcagggccagtcagagtgttagcagcaacttagcctggttccagcagaaacctggccaggctcccaggctcctcatctatggtgcttccaccagggccactggtattccagccaggttcagtgtcagtgggtctgggacagagttcactctcaccatcagcagcctgcagtctgaagattttgcagtttattactgtctgcaggataataattggcctcccactttcggccctgggaccaaagtggatatcaaa

SEQ ID NO: 218 - DNA, 321 bp, Artificial Sequence
  Description of Artificial Sequence: Synthetic polynucleotide
  Anti-TREM2 Antibody Variable Region Nucleic Acid - LV Antibody ID 25F12
gaaaaagtgatgacgcagtctccagccaccctgtctgtgtctccaggggaaagagccaccctctcctgcagggccagtcagagtgttaacaacaacttagcctggtaccagcagaaacctggccaggctcccaggctcctcatctatggtgcatccaccagggccactggtatcccagccaggttcagtggcagtgggtctgggacagagttcactctcaccatcagcagcctgcagtctgaagattttgcagtttattactgtcagcagtataataactggcctcggacgttcggccaagggaccaaggtggaaatcaaa

SEQ ID NO: 219 - DNA, 324 bp, Artificial Sequence
  Description of Artificial Sequence: Synthetic polynucleotide
  Anti-TREM2 Antibody Variable Region Nucleic Acid - LV Antibody ID 32E3
gaatttgtgttgacgcagtctccaggcaccctgtctttgtctccgggggaaagagccaccctctcctgcagggccagtcagattattagcagcaactacttagcctggtaccagcagaaacctggccaggctcccaggctcctcatctatagtgcatccagcagggccactggcatcccagacaggttcagtggcagtgggtctgggacagacttcactctcaccatcagcagactggagcctgaagattttgcagtgtattactgtcagcagtttgatagctcaccgatcaccttcggccgagggacacgactggacattaaa

SEQ ID NO: 220 - DNA, 324 bp, Artificial Sequence
  Description of Artificial Sequence: Synthetic polynucleotide
  Anti-TREM2 Antibody Variable Region Nucleic Acid - LV Antibody ID 24F4
gaaattgtgttgacgcagtctccaggcaccctgtctttgtctccaggggaaagagccaccctctcctgcagggccagtcagagtgttagcagcagctacttagcctggtaccagcagaaacctggccaggctcccaggctcctcatctatggtgcatccagcagggccactggcatcccagacaggttcagtggcagtgggtctgggacagacttcactctcaccatcagcagactggagcctgaagattttgcactgtattactgtcagcagtatgatacctcaccattcactttcggccctgggaccaaagtggatatcaaa

SEQ ID NO: 221 - DNA, 321 bp, Artificial Sequence
  Description of Artificial Sequence: Synthetic polynucleotide
  Anti-TREM2 Antibody Variable Region Nucleic Acid - LV Antibody ID 16B8
gacatccagatgacccagtctccatcttccgtgtctgcatctgtaggagacagagtcaccgtcacttgtcgggcgagtcaggatattaacagctggttagcctggtatcagcagaaaccagggaaagcccctaagctcctgatctatgctgcatcctctttgcaaactggggtcccttcaaggttcagcggcagtggatctgggacagatttcactctcaccatcagcagcctgcagcctgaagattttgcaacttactcttgtcaacagtctaacagtttcccgatcaccttcggccaagggacacgactggagattaaa

SEQ ID NO: 222 - DNA, 321 bp, Artificial Sequence
  Description of Artificial Sequence: Synthetic polynucleotide
  Anti-TREM2 Antibody Variable Region Nucleic Acid - LV Antibody ID 4C5
gacatccagatgacccagtctccatcttccgtgtctgcatctgtaggagacagagtcaccatcacttgtcgggcgagtcagggtattagcaactggttagcctggtatcagcagaaaccagggaaagcccctaagctcctgatctatgctgcatccagtttgcaagttggggtcccattaaggttcagcggcagtggatctgggacagatttcactctcaccatcagcagcctgcagcctgaagattttgcaacttactattgtcaacaggctgacagtttccctcgcaattttggccaggggaccaagctggagatcaaa

SEQ ID NO: 223 - DNA, 321 bp, Artificial Sequence
  Description of Artificial Sequence: Synthetic polynucleotide
  Anti-TREM2 Antibody Variable Region Nucleic Acid - LV Antibody ID 6E7 V9 A10 V30 C07 V33 C10 V44 D09 V68 F09
gacatccagatgacccagtctccatcttccgtgtctgcatctgtaggagacagagtcaccatcacttgtcgggcgagtcagggtattagcagctggttagcctggtatcagcagaaaccagggaaagcccctaagctcctgatctatgctgcatccagtttgcaaaatggggtcccatcaaggttcagcggcagtggatctgggacagatttcactctcaccatcagcagcctgcagcctgaagattttgcaacttacttttgtcaacaggctgacagtttccctcgcacttttggccaggggaccaagctggagatcaaa

SEQ ID NO: 224 - DNA, 321 bp, Artificial Sequence
  Description of Artificial Sequence: Synthetic polynucleotide
  Anti-TREM2 Antibody Variable Region Nucleic Acid - LV - Antibody ID 5E3
gacatccagatgacccagtctccatcctcactgtctgcatctgtaggagacagagtcaccatcacttgtcgggcgagtcagggcattagcaattatttagcctggtttcagcagaaaccagggaaagcccctaaatccctgatctatgctgcatccagtttgcaaagtggggtcccatcaaagttcagcggcagtggatctgggacagatttcactctcaccatcagcagcctgcagcctgaagattttgcaacttattactgccaacagtatagtacttacccattcactttcggccctgggaccaaagtggatatcaaa

SEQ ID NO: 225 - DNA, 321 bp, Artificial Sequence
  Description of Artificial Sequence: Synthetic polynucleotide
  Anti-TREM2 Antibody Variable Region Nucleic Acid - LV Antibody ID 4G10
gacatccagatgacccagtctccatcctccctgtctgcatctgtaggagacagagtcaccatcacttgccgggcaagtcagggcataagaaatgatttaggctggtatcagcagaaaccagggaatgcccctaagcgcctgatctatgctgcatccagtttgccaagtggggtcccatcaaggttcagcggcagtggatctgggccagaattcactctcacaatcagcagtctgcagcctgaagattttgcaacttattactgtctacagcataatagttacccgtggacgttcggccaagggaccaaggtggaaatcaca

SEQ ID NO: 226 - DNA, 321 bp, Artificial Sequence
  Description of Artificial Sequence: Synthetic polynucleotide
  Anti-TREM2 Antibody Variable Region Nucleic Acid - LV Antibody ID V3 A04
gacatccagatgacccagtctccatcttccgtgtctgcatctgtaggagacagagtcaccatcacttgtcgggcgagtcagggtattagcagctggttagcctggtatcagcagaaaccagggaaagcccctaagctcctgatctatgctgcatccagtaggcaaaatggggtcccatcaaggttcagcggcagtggatctgggacagatttcactctcaccatcagcagcctgcagcctgaagattttgcaacttacttttgtcaacaggctgacaggttccctcgcacttttggccaggggaccaagctggagatcaaa

SEQ ID NO: 227 - DNA, 321 bp, Artificial Sequence
  Description of Artificial Sequence: Synthetic polynucleotide
  Anti-TREM2 Antibody Variable Region Nucleic Acid - LV Antibody ID V24 C01
gacatccagatgacccagtctccatcttccgtgtctgcatctgtaggagacagagtcaccatcacttgtcgggcgagtcagggtattagcagctggttagcctggtatcagcagaaaccagggaaagcccctaagctcctgatctatgctgcatccagtttgcaaaagggggtcccatcaaggttcagcggcagtggatctgggacagatttcactctcaccatcagcagcctgcagcctgaagattttgcaacttacttttgtcaacaggctgacagtttccctcatacttttggccaggggaccaagctggagatcaaa

SEQ ID NO: 228 - DNA, 321 bp, Artificial Sequence
  Description of Artificial Sequence: Synthetic polynucleotide
  Anti-TREM2 Antibody Variable Region Nucleic Acid - LV Antibody ID V27
gacatccagatgacccagtctccatcttccgtgtctgcatctgtaggagacagagtcaccatcacttgtcgggcgagtcagggtattagcagctggttagcctggtatcagcagaaaccagggaaagcccctaagctcctgatctatgctgcatccagtttgcaacgtggggtcccatcaaggttcagcggcagtggatctgggacagatttcactctcaccatcagcagcctgcagcctgaagattttgcaacttacttttgtcaacaggctgacagtttccctcgcacttttggccaggggaccaagctggagatcaaa

SEQ ID NO: 229 - DNA, 321 bp, Artificial Sequence
  Description of Artificial Sequence: Synthetic polynucleotide
  Anti-TREM2 Antibody Variable Region Nucleic Acid - LV Antibody ID V40 D05
gacatccagatgacccagtctccatcttccgtgtctgcatctgtaggagacagagtcaccatcacttgtcgggcgagtcagggtattagcagctggttagcctggtatcagcagaaaccagggaaagcccctaagctcctgatctatgctgcatccagtttgcaacttggggtcccatcaaggttcagcggcagtggatctgggacagatttcactctcaccatcagcagcctgcagcctgaagattttgcaacttacttttgtcaacaggctgaccgtttccctcgcacttttggccaggggaccaagctggagatcaaa

SEQ ID NO: 230 - DNA, 321 bp, Artificial Sequence
  Description of Artificial Sequence: Synthetic polynucleotide
  Anti-TREM2 Antibody Variable Region Nucleic Acid - LV Antibody ID V48 E01
gacatccagatgacccagtctccatcttccgtgtctgcatctgtaggagacagagtcaccatcacttgtcgggcgagtcagggtattagcagctggttagcctggtatcagcagaaaccagggaaagcccctaagctcctgatctatgctgcatccagtttgcaaacgggggtcccatcaaggttcagcggcagtggatctgggacagatttcactctcaccatcagcagcctgcagcctgaagattttgcaacttacttttgtcaacaggctgacagtttgcctcgcacttttggccaggggaccaagctggagatcaaa

SEQ ID NO: 231 - DNA, 321 bp, Artificial Sequence
  Description of Artificial Sequence: Synthetic polynucleotide
  Anti-TREM2 Antibody Variable Region Nucleic Acid - LV Antibody ID V49 E02
gacatccagatgacccagtctccatcttccgtgtctgcatctgtaggagacagagtcaccatcacttgtcgggcgagtcagggtattagcagctggttagcctggtatcagcagaaaccagggaaagcccctaagctcctgatctatgctgcatccagtcggcaaaatggggtcccatcaaggttcagcggcagtggatctgggacagatttcactctcaccatcagcagcctgcagcctgaagattttgcaacttacttttgtcaacaggctgacagttatcctcgcacttttggccaggggaccaagctggagatcaaa

SEQ ID NO: 232 - DNA, 321 bp, Artificial Sequence
  Description of Artificial Sequence: Synthetic polynucleotide
  Anti-TREM2 Antibody Variable Region Nucleic Acid - LV Antibody ID V52 E05
gacatccagatgacccagtctccatcttccgtgtctgcatctgtaggagacagagtcaccatcacttgtcgggcgagtcagggtattagcagctggttagcctggtatcagcagaaaccagggaaagcccctaagctcctgatctatgctgcatccagtttgcaaaggggggtcccatcaaggttcagcggcagtggatctgggacagatttcactctcaccatcagcagcctgcagcctgaagattttgcaacttacttttgtcaacaggctgaccgtttccctcgcacttttggccaggggaccaagctggagatcaaa

SEQ ID NO: 233 - DNA, 321 bp, Artificial Sequence
  Description of Artificial Sequence: Synthetic polynucleotide
  Anti-TREM2 Antibody Variable Region Nucleic Acid - LV Antibody ID V60 F01
gacatccagatgacccagtctccatcttccgtgtctgcatctgtaggagacagagtcaccatcacttgtcgggcgagtcagggtattagcagctggttagcctggtatcagcagaaaccagggaaagcccctaagctcctgatctatgctgcatccagtttgcaaaggggggtcccatcaaggttcagcggcagtggatctgggacagatttcactctcaccatcagcagcctgcagcctgaagattttgcaacttacttttgtgggcaggctgacagtttccctcgcacttttggccaggggaccaagctggagatcaaa

SEQ ID NO: 234 - DNA, 321 bp, Artificial Sequence
  Description of Artificial Sequence: Synthetic polynucleotide
  Anti-TREM2 Antibody Variable Region Nucleic Acid - LV Antibody ID V73 G02
gacatccagatgacccagtctccatcttccgtgtctgcatctgtaggagacagagtcaccatcacttgtcgggcgagtcagggtattagcagctggttagcctggtatcagcagaaaccagggaaagcccctaagctcctgatctatgctgcatccagtcgtcaaaatggggtcccatcaaggttcagcggcagtggatctgggacagatttcactctcaccatcagcagcctgcagcctgaagattttgcaacttacttttgtcaacaggctgacagttatcctcgcacttttggccaggggaccaagctggagatcaaa

SEQ ID NO: 235 - DNA, 321 bp, Artificial Sequence
  Description of Artificial Sequence: Synthetic polynucleotide
  Anti-TREM2 Antibody Variable Region Nucleic Acid - LV Antibody ID V76 G05
gacatccagatgacccagtctccatcttccgtgtctgcatctgtaggagacagagtcaccatcacttgtcgggcgagtcagggtattagcagctggttagcctggtatcagcagaaaccagggaaagcccctaagctcctgatctatgctgcatccagtttgcaaaagggggtcccatcaaggttcagcggcagtggatctgggagagatttcactctcaccatcagcagcctgcagcctgaagattttgcaacttacttttgtcaacaggctgacagtttccctcgcacttttggccaggggaccaagctggagatcaaa

SEQ ID NO: 236 - DNA, 321 bp, Artificial Sequence
  Description of Artificial Sequence: Synthetic polynucleotide
  Anti-TREM2 Antibody Variable Region Nucleic Acid - LV Antibody ID V84 H01
gacatccagatgacccagtctccatcttccgtgtctgcatctgtaggagacagagtcaccatcacttgtcgggcgagtcagggtattagcagctggttagcctggtatcagcagaaaccagggaaagcccctaagctcctgatctatggtgcatccagtttgcaaaatggggtcccatcaaggttcagcggcagtggatctgggacagatttcactctcaccatcagcagcctgcagcctgaagattttgcaacttacttttgtcaacaggctgacagtttcccgcgcacttttggccaggggaccaagctggagatcaaa

SEQ ID NO: 237 - DNA, 363 bp, Artificial Sequence
  Description of Artificial Sequence: Synthetic polynucleotide
  Anti-TREM2 Antibody Variable Region Nucleic Acid - HV Antibody ID 12G10 24C12
gaggtgcagctgttggagtctgggggaggcttggtacagcctggggggtccctgagactctcctgtgcagcctctggattcacctttagcagctatgccatgagctgggtccgccaggctccagggaaggggctggagtgggtctcagctattggtggtggtggtgttagcacatactgcgcagactccgtgaagggccggttcaccatctccagagacaattccaagaatacgctgtatctgcaaatgaacagcctgagagccgaggacacggccgtatattactgtgcgaaattttatatagcagtggctggttctcactttgactactggggccagggaaccctggtcaccgtctcctca

SEQ ID NO: 238 - DNA, 378 bp, Artificial Sequence
  Description of Artificial Sequence: Synthetic polynucleotide
  Anti-TREM2 Antibody Variable Region Nucleic Acid - HV Antibody ID 26A10
gaggtgcaactggtggagtctgggggagccttggtacagcggggggggtccctgagactctcctgtgcagcctctagattcaccttcagtagctttggcatgagctgggtccgccaggctccagggaaggggctggagtgggtttcatacattagtagtagtagttttaccatatattacgcagactctgtgaagggccgattcaccatctccagagacaatgccaagaattcattctatctgcaaatgaacagcctgagagacgaggacacggctgtgtattactgtgcgagagaggggggtcttactatggttcggggagtctcttcctacggtttggacgtctggggccaagggaccacggtcaccgtctcctca

SEQ ID NO: 239 - DNA, 378 bp, Artificial Sequence
  Description of Artificial Sequence: Synthetic polynucleotide
  Anti-TREM2 Antibody Variable Region Nucleic Acid - HV 26C10
gaggtgcaactggtggagtctgggggagccttggtacagcctggggggtccctgagactctcctgtgcagcctctggattcaccttcagtagctttggcatgagctgggtccgccaggctccagggaaggggctggagtgggtttcatacattagtagtagtagttttaccatatactacgcagactctgtgaagggccgattcaccatctccagagacaatgccaagaattcgttctatctgcaaatgaacagcctgagagacgaggacacggctgtgtatttctgtgtgagagaggggggtataactatggttcggggagtctcttcctacggtatggacgtctggggccaagggaccacggtcaccgtctcctca

SEQ ID NO: 240 - DNA, 378 bp, Artificial Sequence
  Description of Artificial Sequence: Synthetic polynucleotide
  Anti-TREM2 Antibody Variable Region Nucleic Acid - HV Antibody ID 26F2
gaggtgcaactggtggagtctgggggagccttggtacagcctggggggtccctgagactctcctgtgcagcctctggattcaccttcagtagctttggcatgagctgggtccgccaggctccagggaaggggctggagtggatttcatacattagtagtagtagttttaccatatactacgcagactctgtgaagggccgattcaccatctccagagacaatgccaagaattcattctatctgcaaatgaacagcctgagagacgaggacacggctgtgtatttctgtgcgagagaggggggtattactatggttcggggagtctcttcctacggtatggacgtctggggccaagggaccacggtcaccgtctcctca

SEQ ID NO: 241 - DNA, 378 bp, Artificial Sequence
  Description of Artificial Sequence: Synthetic polynucleotide
  Anti-TREM2 Antibody Variable Region Nucleic Acid - HV Antibody ID 33B12
gaggtgcaactggtggagtctgggggagccttggtacagcctggggggtccctgagactctcctgtgcagcctctggattcaccttcagtagctttggcatgagctgggtccgccaggctccagggaagggcctggagtgggtttcatacattagtaaaagtagttttaccatatactacgcagactctgtgaagggccgattcaccatctccagagacaatgccaagaattcattctatctgcaaatgaacagcctgagagacgaggacacggctgtgtattactgtgcgagagaggggggtcttactatggttcggggagtctcttcctacggtttggacgtctggggccaagggaccacggtcaccgtctcctca

SEQ ID NO: 242 - DNA, 357 bp, Artificial Sequence
  Description of Artificial Sequence: Synthetic polynucleotide
  Anti-TREM2 Antibody Variable Region Nucleic Acid - HV Antibody ID 24G6
gaggtgcagctgttggagtctgggggaggcttggtacagcctggggggtccctgagactctcctgtgcagcctctggattcacctttagcagctatgccatgagctgggtccgccaggctccagggaagggactggagtgggtctcagctattagtggtagtggtggtagcacatactacgcagactccgtgaagggccggttcaccatctccagagacaattccaagaacacgctgtatctgcaaatgaacagcctgagagccgaggacacggccgtatattactgtgcgaaggcgtatacacctatggcattctttgactactggggccagggaaccctggtcaccgtctcctca

SEQ ID NO: 243 - DNA, 348 bp, Artificial Sequence
  Description of Artificial Sequence: Synthetic polynucleotide
  Anti-TREM2 Antibody Variable Region Nucleic Acid - HV Antibody ID 24A10
gaggtgcaggtgttggagtctgggggaggcttggtacagcctggggggtccctgagactctcctgtgcagcctctggattcacctttagcaactatgccatgagctgggtccgccaggctccagggaaggggctggagtgggtctcagctattagtggtagtggtggtagcacatactacgcagactccgtgaagggccggttcaccatctccagagacaattccaagaacacgctgtatctgcaaatgaacagcctgagagccgaggacacggccgtatattactgtgcgaaaggagggtgggagctattttactggggccagggaaccctggtcaccgtctcctca

SEQ ID NO: 244 - DNA, 363 bp, Artificial Sequence
  Description of Artificial Sequence: Synthetic polynucleotide
  Anti-TREM2 Antibody Variable Region Nucleic Acid - HV Antibody ID 10E3
gaggtgcagctggtgcagtctggagcagaggtgaaaaagcccggggagtctctgatgatctcctgtaagggttctggatacagctttaccaactactggatcggctgggtgcgccagatgcccgggaaaggcctggagtggatggggatcatctatcctggagactctgataccagatacagcccgtccttccaaggccaggtcaccatctcagccgacaagtccatcagcaccgcctacctgcagtggagcagcctgaaggcctcggacaccgccatgtatttctgtgcgagacggagacaggggatctggggtgatgctcttgatatctggggccaagggacattggtcaccgtctcttca

SEQ ID NO: 245 - DNA, 363 bp, Artificial Sequence
  Description of Artificial Sequence: Synthetic polynucleotide
  Anti-TREM2 Antibody Variable Region Nucleic Acid - HV Antibody ID 13E7
gaggtgcagctggtgcagtctggagcagaggtgaaaaagcccggggagtctctgatgatctcctgtaagggttctggatacagctttaccagctactggatcggctgggtgcgccagatgcccgggaaaggcctggagtggatggggatcatctatcctggagactctgataccagatacagcccgtccttccaaggccaggtcaccatctcagccgacaagtccatcagcaccgcctacctgcagtggagcagcctgaaggcctcggacaccgccatgtatttctgtgcgagacggagacaggggatctggggtgatgctcttgatttctggggccaagggacattggtcaccgtctcttca

SEQ ID NO: 246 - DNA, 372 bp, Artificial Sequence
  Description of Artificial Sequence: Synthetic polynucleotide
  Anti-TREM2 Antibody Variable Region Nucleic Acid - HV Antibody ID 25F12
  modified_base (366)..(366): a, c, g, or t
caggtgcagctacagcagtggggcgcaggactgttgaagccttcggagaccctgtccctcacctgcgctgtctatggtgggtccttcagtagttactactggagctggatccgccagcccccagggaaggggctggagtggattggggaaatcaatcatagtggaaacaccaactacaacccgtccctcaagagtcgagtcaccatatcagtagacacgtccaagaaccagttctccctgaagctgagctctgtgaccgccgcggacacggctgtgtattactgtgcgagagaggggtattacgatatcttgactggttatcatgatgcttttgatatttgggaccaagggacaatggtcaccgtnttttca

SEQ ID NO: 247 - DNA, 366 bp, Artificial Sequence
  Description of Artificial Sequence: Synthetic polynucleotide
  Anti-TREM2 Antibody Variable Region Nucleic Acid - HV Antibody ID 32E3
gaggtgcagctggtgcagtctggagcagaggtgaaaaagcccggggagtctctgaagatctcctgtaagggttctggatacagctttaccagctactggatcggctgggtgcgccagatgcccgggaaaggcctggagtggatggggatcatctatcctggtgactctgataccagatacagcccgtccttccaaggccaggtcaccatctcagccgacaagtccatcagcaccgcctacctgcagtggagcaccctgaaggcctcggacaccgccatatattactgtgcgcgacatgacattataccagcagcccctggtgcttttgatatctggggccaagggacaatggtcaccgtctcttca

SEQ ID NO: 248 - DNA, 366 bp, Artificial Sequence
  Description of Artificial Sequence: Synthetic polynucleotide
  Anti-TREM2 Antibody Variable Region Nucleic Acid - HV Antibody ID 24F4
gaggtgcagctggtgcagtctggagcagaggtgaaaaagcccggggagtctctgaagatctcctgtaagggttctggatacacctttaccagctactggatcggctgggtgcgccagatgcccgggaaaggcctggagtggatggggatcatctatcctggtgactctgataccagatacagcccgtccttccaaggccaggtcaccatctcagtcgacaagtccagcagcaccgcctacctgcagtggagcagcctgaaggcctcggacaccgccatatattactgtacgagacaggccatagcagtgactggtttggggggtttcgacccctggggccagggaaccctggtcaccgtctcctca

SEQ ID NO: 249 - DNA, 357 bp, Artificial Sequence
  Description of Artificial Sequence: Synthetic polynucleotide
  Anti-TREM2 Antibody Variable Region Nucleic Acid - HV Antibody ID 16B8
caggttcagctggtgcagtctggagctgaggtgaagaagcctggggcctcagtgaaggtctcctgcaaggcttctggttacacctttaccaactatggtatcagctgggtgcgacaggcccctggacaagggcttgagtggatgggatggatcagcgcttacaatggtaacacaaactatgcacagaagctccagggcagagtcaccatgaccacagacacatccacgagtacagtctacatggagctgaggagcctgagatctgacgacacggccgtgtattactgtgcgagacggggatacagctatggttcctttgactactggggccagggaaccctggtcaccgtctcctca

SEQ ID NO: 250 - DNA, 369 bp, Artificial Sequence
  Description of Artificial Sequence: Synthetic polynucleotide
  Anti-TREM2 Antibody Variable Region Nucleic Acid - HV Antibody ID 4C5
gaggtgcagctggtgcagtctggagcagaagtgaaaaagcccggggagtctctgaagatctcctgtaagggttctggacacagttttaccaactactggatcgcctgggtgcgccagatgcccgggaaaggcctggagtggatggggatcatctatcctggtgactctgataccagatacagcccgtccttccaaggccaggtcaccatctcagccgacaagtccatcagcaccgcctacctgcagtggagcagcctgaaggcctcggacaccgccgtgtatttctgtgcgagacaaaggacgttttactatgatagtagtggttattttgactactggggccagggaaccctggtcaccgtctcctca

SEQ ID NO: 251 - DNA, 369 bp, Artificial Sequence
  Description of Artificial Sequence: Synthetic polynucleotide
  Anti-TREM2 Antibody Variable Region Nucleic Acid - HV Antibody ID 6E7
gaggtgcagctggtgcagtctggagcagaggtgaaaaagcccggggagtctctgaagatctcctgtaagggttctggatacagttttaccagctactggatcgcctgggtgcgccagatgcccgggaaaggcctggagtggatggggatcatctatcctggtgactctgataccagatacagcccgtccttccaaggccaggtcaccatctcagccgacaagtccatcagcaccgcctacctacagtggagcagcctgaaggcctcggacaccgccatgtatttctgtgcgagacaaaggacgttttattatgatagtagtgattattttgactactggggccagggaaccctggtcaccgtctcctca

SEQ ID NO: 252 - DNA, 363 bp, Artificial Sequence
  Description of Artificial Sequence: Synthetic polynucleotide
  Anti-TREM2 Antibody Variable Region Nucleic Acid - HV Antibody ID 5E3
caggtgcagctggtgcagtctggggctgaggtgaagaagcctggggcctcagtgaaggtctcctgcaaggcttctggatacaccttcaccggctactatatacactgggtgcgacaggcccctggactagggcttgagtggatgggatggatcaacccttacagtggtggcacaacctctgcacagaagtttcagggcagggtcaccatgaccagggacacgtccatcagctcagcctacatggaactgagcaggctgagatctgacgacacggccgtgtattactgtgcgagagatggaggctacctggccctctacggtacggacgtctggggccaagggaccacggtcaccgtctcctca

SEQ ID NO: 253 - DNA, 366 bp, Artificial Sequence
  Description of Artificial Sequence: Synthetic polynucleotide
  Anti-TREM2 Antibody Variable Region Nucleic Acid - HV Antibody ID 4G10
gaggtgcagctggtgcagtctggagcagaggtgaaaaagcccggggagtctctgaagatctcctgtaagggttctggatacagctttcccagctactggatcgcctgggtgcgccagatgcccgggaaaggcctggagtggatggggatcatctatcctggtgactctgataccagatacagcccgtccttccaaggccaggtcaccatctcagccgacaagtccatcagcaccgcctttttgaagtggagtagcctgaaggcctcggacaccgccatgtatttctgtgcgcgacagggtatagaagtgactggtacgggaggtttggacgtctggggccaagggaccacggtcaccgtctcctca

SEQ ID NO: 254 - DNA, 369 bp, Artificial Sequence
  Description of Artificial Sequence: Synthetic polynucleotide
  Anti-TREM2 Antibody Variable Region Nucleic Acid - HV Antibody ID V3 A04
gaggtgcagctggtgcagtctggagcagaggtgaaaaagcccggggagtctctgaagatctcctgtaagggttctggatacagttttgcgagctactggatcgcctgggtgcgccagatgcccgggaaaggcctggagtggatggggatcatctatcctggtgactctgataccagatacagcccgtccttccaagatcaggtcaccatctcagccgacaagtccatcagcaccgcctacctacagtggagcagcctgaaggcctcggacaccgccatgtatttctgtgcgagagggaggacgttttattatgatagtagtgattattttgactactggggccagggaaccctggtcaccgtgtcctca

SEQ ID NO: 255 - DNA, 369 bp, Artificial Sequence
  Description of Artificial Sequence: Synthetic polynucleotide
  Anti-TREM2 Antibody Variable Region Nucleic Acid - HV Antibody ID V24 C01
gaggtgcagctggtgcagtctggagcagaggtgaaaaagcccggggagtctctgaagatctcctgtaagggttctggatacagttttaccagctactggattgcctgggtgcgccagatgcccgggaaaggcctggagtggatggggatcatctatcctggtgactctgatgtgagatacagcccgtccttccaaggccaggtcaccatctcagccgacaagtccatcagcaccgcctacctacagtggagcagcctgaaggcctcggacaccgccatgtatttctgtgcgagatctaggacgttttattatgatagtagtgattattttgactactggggccagggaaccctggtcaccgtgtcctca

SEQ ID NO: 256 - DNA, 369 bp, Artificial Sequence
  Description of Artificial Sequence: Synthetic polynucleotide
  Anti-TREM2 Antibody Variable Region Nucleic Acid - HV Antibody ID V27 C04
gaggtgcagctggtgcagtctggagcagaggtgaaaaagcccggggagtctctgaagatctcctgtaagggttctggatacagttttaccagctactggatcgcctgggtgcgccagatgcccgggaaaggcctggagtggatggggatcatctatcctggtgactctgataccagatacgctccgtccttccaaggccaggtcaccatctcagccgacaagtccatcagcaccgcctacctacagtggagcagcctgaaggcctcggacaccgccatgtatttctgtgtgagaagtaggacgttttattatgatagtagtgattattttgactactggggccagggaaccctggtcaccgtgtcctca

SEQ ID NO: 257 - DNA, 369 bp, Artificial Sequence
  Description of Artificial Sequence: Synthetic polynucleotide
  Anti-TREM2 Antibody Variable Region Nucleic Acid - HV Antibody ID V40 D05
gaggtgcagctggtgcagtctggagcagaggtgaaaaagcccggggagtctctgaagatctcctgtaagggttctggatacagttttgggagctactggatcgcctgggtgcgccagatgcccgggaaaggcctggagtggatggggatcatctatcctggtgactctgatgttagatacagcccgtccttccaaggccaggtcaccatctcagccgacaagtccatcagcaccgcctacctacagtggagcagcctgaaggcctcggacaccgccatgtatttctgtgcgagacaaaggacgttttattatgatagtagtgattattcggactactggggccagggaaccctggtcaccgtgtcctca

SEQ ID NO: 258 - DNA, 369 bp, Artificial Sequence
  Description of Artificial Sequence: Synthetic polynucleotide
  Anti-TREM2 Antibody Variable Region Nucleic Acid - HV Antibody ID V48 E01
gaggtgcagctggtgcagtctggagcagaggtgaaaaagcccggggagtctctgaagatctcctgtaagggttctggatacagttttggtagctactggatcgcctgggtgcgccagatgcccgggaaaggcctggagtggatggggatcatctatcctggtgactctgatgtgagatacagcccgtccttccaaggccaggtcaccatctcagccgacaagtccatcagcaccgcctacctacagtggagcagcctgaaggcctcggacaccgccatgtatttctgtgcgagaatgaggacgttttattatgatagtagtgattattttgactactggggccagggaaccctggtcaccgtgtcctca

SEQ ID NO: 259 - DNA, 369 bp, Artificial Sequence
  Description of Artificial Sequence: Synthetic polynucleotide
  Anti-TREM2 Antibody Variable Region Nucleic Acid - HV Antibody ID V49 E02
gaggtgcagctggtgcagtctggagcagaggtgaaaaagcccggggagtctctgaagatctcctgtaagggttctggatacagttttaatagctactggatcgcctgggtgcgccagatgcccgggaaaggcctggagtggatggggacgatctatcctggtgactctgataccagactgagcccgtccttccaaggccaggtcaccatctcagccgacaagtccatcagcaccgcctacctacagtggagcagcctgaaggcctcggacaccgccatgtatttctgtgcgagaagtaggacgttttattatgatagtagtgattattttgactactggggccagggaaccctggtcaccgtgtcctca

SEQ ID NO: 260 - DNA, 369 bp, Artificial Sequence
  Description of Artificial Sequence: Synthetic polynucleotide
  Anti-TREM2 Antibody Variable Region Nucleic Acid - HV Antibody ID V52 E05
gaggtgcagctggtgcagtctggagcagaggtgaaaaagcccggggagtctctgaagatctcctgtaagggttctggatacagttttgagagctactggatcgcctgggtgcgccagatgcccgggaaaggcctggagtggatggggatcatctatcctggtgactctgataccagatacagcccgtccttccaaggccaggtcaccatctcagccgacaagtccatcagcaccgcctacctacagtggagcagcctgaaggcctcggacaccgccatgtatttctgtgcgagagggaggacgttttattatgatagtagtgattattttgactactggggccagggaaccctggtcaccgtgtcctca

SEQ ID NO: 261 - DNA, 369 bp, Artificial Sequence
  Description of Artificial Sequence: Synthetic polynucleotide
  Anti-TREM2 Antibody Variable Region Nucleic Acid - HV Antibody ID V60 F01
gaggtgcagctggtgcagtctggagcagaggtgaaaaagcccggggagtctctgaagatctcctgtaagggttctggataccattttaccagctactggatcgcctgggtgcgccagatgcccgggaaaggcctggagtggatggggatcatctatcctggtgactctgatgtgagatacagcccgtccttccaaggccaggtcaccatctcagccgacaagtccatcagcaccgcctacctacagtggagcagcctgaaggcctcggacaccgccatgtatttctgtgcgagacaaaggacgttttattatgatagtagtgattatagtgactactggggccagggaaccctggtcaccgtgtcctca

SEQ ID NO: 262 - DNA, 369 bp, Artificial Sequence
  Description of Artificial Sequence: Synthetic polynucleotide
  Anti-TREM2 Antibody Variable Region Nucleic Acid - HV Antibody ID V73 G02
gaggtgcagctggtgcagtctggagcagaggtgaaaaagcccggggagtctctgaagatctcctgtaagggttctggatacagttttggtagctactggatcgcctgggtgcgccagatgcccgggaaaggcctggagtggatggggatcatctatcctggtgactctgataccagatacagcccggggttccaaggccaggtcaccatctcagccgacaagtccatcagcaccgcctacctacagtggagcagcctgaaggcctcggacaccgccatgtatttctgtgcgagagggaggacgttttattatgatagtagtgattattttgactactggggccagggaaccctggtcaccgtgtcctca

SEQ ID NO: 263 - DNA, 369 bp, Artificial Sequence
  Description of Artificial Sequence: Synthetic polynucleotide
  Anti-TREM2 Antibody Variable Region Nucleic Acid - HV Antibody ID V76 G05
gaggtgcagctggtgcagtctggagcagaggtgaaaaagcccggggagtctctgaagatctcctgtaagggttctggatacagttttgggagctactggatcgcctgggtgcgccagatgcccgggaaaggcctggagtggatggggatcatctatcctggtgactctgataccagatacagcccggagttccaaggccaggtcaccatctcagccgacaagtccatcagcaccgcctacctacagtggagcagcctgaaggcctcggacaccgccatgtatttctgtgcgagacaaaggacgttttattatgatagtagtgattatagtgactactggggccagggaaccctggtcaccgtgtcctca

SEQ ID NO: 264 - DNA, 369 bp, Artificial Sequence
  Description of Artificial Sequence: Synthetic polynucleotide
  Anti-TREM2 Antibody Variable Region Nucleic Acid - HV Antibody ID V84 H01
gaggtgcagctggtgcagtctggagcagaggtgaaaaagcccggggagtctctgaagatctcctgtaagggttctggatacgggtttaccagctactggatcgcctgggtgcgccagatgcccgggaaaggcctggagtggatggggatcatctatcctggtgacagtgataccagatacagcccgtccttccaaggccaggtcaccatctcagccgacaagtccatcagcaccgcctacctacagtggagcagcctgaaggcctcggacaccgccatgtatttctgtgcgagacaaaggacgttttattatgatagtagtgattattcggactactggggccagggaaccctggtcaccgtgtcctca

SEQ ID NO: 265 - protein, 22 aa, Artificial Sequence
  Description of Artificial Sequence: Synthetic peptide
  Secretory peptide #1
MDMRVPAQLLGLLLLWLRGARC

SEQ ID NO: 266 - protein, 19 aa, Artificial Sequence
  Description of Artificial Sequence: Synthetic peptide
  Secretory peptide #2
MAWALLLLTLLTQGTGSWA

SEQ ID NO: 267 - skipped

SEQ ID NO: 268 - protein, 20 aa, Artificial Sequence
  Description of Artificial Sequence: Synthetic peptide
  Secretory peptide #4
MEAPAQLLFLLLLWLPDTTG

SEQ ID NO: 269 - protein, 19 aa, Artificial Sequence
  Description of Artificial Sequence: Synthetic peptide
  Secretory peptide #5
MEWTWRVLFLVAAATGAHS

SEQ ID NO: 270 - protein, 20 aa, Artificial Sequence
  Description of Artificial Sequence: Synthetic peptide
  Secretory peptide #6
METPAQLLFLLLLWLPDTTG

SEQ ID NO: 271 - protein, 9 aa, Artificial Sequence
  Description of Artificial Sequence: Synthetic peptide
  CDRL3 Antibody ID V83
QQAVSFPRT

SEQ ID NO: 272 - protein, 19 aa, Artificial Sequence
  Description of Artificial Sequence: Synthetic peptide
  Secretory peptide #8
MKHLWFFLLLVAAPRWVLS

SEQ ID NO: 273 - protein, 19 aa, Artificial Sequence
  Description of Artificial Sequence: Synthetic peptide
  Secretory peptide #9
MEWSWVFLFFLSVTTGVHS

SEQ ID NO: 274 - protein, 22 aa, Artificial Sequence
  Description of Artificial Sequence: Synthetic peptide
  Secretory peptide #10
MDIRAPTQLLGLLLLWLPGAKC

SEQ ID NO: 275 - protein, 22 aa, Artificial Sequence
  Description of Artificial Sequence: Synthetic peptide
  Secretory peptide #11
MDIRAPTQLLGLLLLWLPGARC

SEQ ID NO: 276 - protein, 22 aa, Artificial Sequence
  Description of Artificial Sequence: Synthetic peptide
  Secretory peptide #12
MDTRAPTQLLGLLLLWLPGATF

SEQ ID NO: 277 - protein, 22 aa, Artificial Sequence
  Description of Artificial Sequence: Synthetic peptide
  Secretory peptide #13
MDTRAPTQLLGLLLLWLPGARC

SEQ ID NO: 278 - protein, 19 aa, Artificial Sequence
  Description of Artificial Sequence: Synthetic peptide
  Secretory peptide #14
METGLRWLLLVAVLKGVQC

SEQ ID NO: 279 - protein, 21 aa, Artificial Sequence
  Description of Artificial Sequence: Synthetic peptide
  Secretory peptide #15
METGLRWLLLVAVLKGVQCQE

SEQ ID NO: 280 - protein, 22 aa, Artificial Sequence
  Description of Artificial Sequence: Synthetic peptide
  Secretory peptide #16
MDMRAPTQLLGLLLLWLPGARC

SEQ ID NO: 281 - protein, 217 aa, Homo sapiens
APELLGGPSVFLFPPKPKDTLMISRTPEVTCVVVDVSHEDPEVKFNWYVDGVEVHNAKTKPREEQYGSTYRVVSVLTVLHQDWLNGKEYKCKVSNKALPAPIEKTISKAKGQPREPQVYTLPPSREEMTKNQVSLTCLVKGFYPSDIAVEWESNGQPENNYKTTPPVLDSDGSFFLYSKLTVDKSRWQQGNVFSCSVMHEALHNHYTQKSLSLSPGK

SEQ ID NO: 282 - protein, 217 aa, Homo sapiens
APELLGGPSVFLFPPKPKDTLMISRTPEVTCVVVDVSHEDPEVKFNWYVDGVEVHNAKTKPCEEQYGSTYRCVSVLTVLHQDWLNGKEYKCKVSNKALPAPIEKTISKAKGQPREPQVYTLPPSREEMTKNQVSLTCLVKGFYPSDIAVEWESNGQPENNYKTTPPVLDSDGSFFLYSKLTVDKSRWQQGNVFSCSVMHEALHNHYTQKSLSLSPGK

SEQ ID NO: 283 - protein, 21 aa, Artificial Sequence
  Description of Artificial Sequence: Synthetic peptide
  MOG peptide 35-55
MEVGWYRSPFSRVVHLYRNGK

SEQ ID NO: 284 - protein, 11 aa, Artificial Sequence
  Description of Artificial Sequence: Synthetic peptide
  CDRL1 Consensus for 6E7 reduced Affinity variants
  MOD_RES (1)..(1): R or A
  MOD_RES (8)..(8): S or R
XASQGISXWLA

SEQ ID NO: 285 - protein, 7 aa, Artificial Sequence
  Description of Artificial Sequence: Synthetic peptide
  CDRL2 Consensus for 6E7 reduced Affinity variants
  MOD_RES (1)..(1): A or S
  MOD_RES (3)..(3): S or G
XAXSLQN

SEQ ID NO: 286 - protein, 9 aa, Artificial Sequence
  Description of Artificial Sequence: Synthetic peptide
  CDRL3 Consensus for 6E7 reduced Affinity variants
  MOD_RES (4)..(4): D or V
  MOD_RES (8)..(8): R or L
QQAXSFPXT

SEQ ID NO: 287 - protein, 5 aa, Artificial Sequence
  Description of Artificial Sequence: Synthetic peptide
  CDRH1 Consensus for 6E7 reduced Affinity variants
  MOD_RES (2)..(2): Y or E
SXWIA

SEQ ID NO: 288 - protein, 17 aa, Artificial Sequence
  Description of Artificial Sequence: Synthetic peptide
  CDRH2 Consensus for 6E7 reduced Affinity variants
  MOD_RES (5)..(5): G or S
IIYPXDSDTRYSPSFQG

SEQ ID NO: 289 - protein, 14 aa, Artificial Sequence
  Description of Artificial Sequence: Synthetic peptide
  CDRH3 Consensus for 6E7 reduced Affinity variants
  MOD_RES (3)..(3): T or G
  MOD_RES (5)..(5): Y or R
  MOD_RES (6)..(6): Y or G
QRXFXXDSSDYFDY

SEQ ID NO: 290 - protein, 11 aa, Artificial Sequence
  Description of Artificial Sequence: Synthetic peptide
  CDRL1 Antibody ID V57 E10
AASQGISSWLA

SEQ ID NO: 291 - protein, 11 aa, Artificial Sequence
  Description of Artificial Sequence: Synthetic peptide
  CDRL1 Antibody ID V90 H07
RASQGISRWLA

SEQ ID NO: 292 - protein, 7 aa, Artificial Sequence
  Description of Artificial Sequence: Synthetic peptide
  CDRL2 Antibody ID V10 A11
SASSLQN

SEQ ID NO: 293 - protein, 7 aa, Artificial Sequence
  Description of Artificial Sequence: Synthetic peptide
  CDRL2 Antibody ID V70 F11
AAGSLQN

SEQ ID NO: 294 - protein, 9 aa, Artificial Sequence
  Description of Artificial Sequence: Synthetic peptide
  CDRL2 Antibody ID V23 B12
QQADSFPLT

SEQ ID NO: 295 - protein, 107 aa, Artificial Sequence
  Description of Artificial Sequence: Synthetic polypeptide
  VL Amino Acid Sequence Antibody ID V10 A11
DIQMTQSPSSVSASVGDRVTITCRASQGISSWLAWYQQKPGKAPKLLIYSASSLQNGVPSRFSGSGSGTDFTLTISSLQPEDFATYFCQQADSFPRTFGQGTKLEIK

SEQ ID NO: 296 - protein, 107 aa, Artificial Sequence
  Description of Artificial Sequence: Synthetic polypeptide
  VL Amino Acid Sequence Antibody ID V23 B12
DIQMTQSPSSVSASVGDRVTITCRASQGISSWLAWYQQKPGKAPKLLIYAASSLQNGVPSRFSGSGSGTDFTLTISSLQPEDFATYFCQQADSFPLTFGQGTKLEIK

SEQ ID NO: 297 - protein, 107 aa, Artificial Sequence
  Description of Artificial Sequence: Synthetic polypeptide
  VL Amino Acid Sequence Antibody ID V57 E10
DIQMTQSPSSVSASVGDRVTITCAASQGISSWLAWYQQKPGKAPKLLIYAASSLQNGVPSRFSGSGSGTDFTLTISSLQPEDFATYFCQQADSFPRTFGQGTKLEIK

SEQ ID NO: 298 - protein, 107 aa, Artificial Sequence
  Description of Artificial Sequence: Synthetic polypeptide
  VL Amino Acid Sequence Antibody ID V70 F11
DIQMTQSPSSVSASVGDRVTITCRASQGISSWLAWYQQKPGKAPKLLIYAAGSLQNGVPSRFSGSGSGTDFTLTISSLQPEDFATYFCQQADSFPRTFGQGTKLEIK

SEQ ID NO: 299 - protein, 107 aa, Artificial Sequence
  Description of Artificial Sequence: Synthetic polypeptide
  VL Amino Acid Sequence Antibody ID V83 G12
DIQMTQSPSSVSASVGDRVTITCRASQGISSWLAWYQQKPGKAPKLLIYAASSLQNGVPSRFSGSGSGTDFTLTISSLQPEDFATYFCQQAVSFPRTFGQGTKLEIK

SEQ ID NO: 300 - protein, 107 aa, Artificial Sequence
  Description of Artificial Sequence: Synthetic polypeptide
  VL Amino Acid Sequence Antibody ID V90 H07
DIQMTQSPSSVSASVGDRVTITCRASQGISRWLAWYQQKPGKAPKLLIYAASSLQNGVPSRFSGSGSGTDFTLTISSLQPEDFATYFCQQADSFPRTFGQGTKLEIK

SEQ ID NO: 301 - protein, 4 aa, Artificial Sequence
  Description of Artificial Sequence: Synthetic peptide
  FR1/ CDRH1 border Antibody ID V30 C07
SSFT

SEQ ID NO: 302 - protein, 5 aa, Artificial Sequence
  Description of Artificial Sequence: Synthetic peptide
  CDRH1 Antibody ID V90 H07
SEWIA

SEQ ID NO: 303 - protein, 17 aa, Artificial Sequence
  Description of Artificial Sequence: Synthetic peptide
  CDRH2 Antibody ID V44 D09
IIYPSDSDTRYSPSFQG

SEQ ID NO: 304 - protein, 14 aa, Artificial Sequence
  Description of Artificial Sequence: Synthetic peptide
  CDRH3 Antibody ID V9 A10
QRGFYYDSSDYFDY

SEQ ID NO: 305 - protein, 14 aa, Artificial Sequence
  Description of Artificial Sequence: Synthetic peptide
  CDRH3 Antibody ID V33 C10
QRTFYGDSSDYFDY

SEQ ID NO: 306 - protein, 14 aa, Artificial Sequence
  Description of Artificial Sequence: Synthetic peptide
  CDRH3 Antibody ID V68 F09
QRTFRYDSSDYFDY

SEQ ID NO: 307 - protein, 123 aa, Artificial Sequence
  Description of Artificial Sequence: Synthetic polypeptide
  VH Amino Acid Sequence Antibody ID V9 A10
EVQLVQSGAEVKKPGESLKISCKGSGYSFTSYWIAWVRQMPGKGLEWMGIIYPGDSDTRYSPSFQGQVTISADKSISTAYLQWSSLKASDTAMYFCARQRGFYYDSSDYFDYWGQGTLVTVSS

SEQ ID NO: 308 - protein, 123 aa, Artificial Sequence
  Description of Artificial Sequence: Synthetic polypeptide
  VH Amino Acid Sequence Antibody ID V30 C07
EVQLVQSGAEVKKPGESLKISCKGSGSSFTSYWIAWVRQMPGKGLEWMGIIYPGDSDTRYSPSFQGQVTISADKSISTAYLQWSSLKASDTAMYFCARQRTFYYDSSDYFDYWGQGTLVTVSS

SEQ ID NO: 309 - protein, 123 aa, Artificial Sequence
  Description of Artificial Sequence: Synthetic polypeptide
  VH Amino Acid Sequence Antibody ID V33 C10
EVQLVQSGAEVKKPGESLKISCKGSGYSFTSYWIAWVRQMPGKGLEWMGIIYPGDSDTRYSPSFQGQVTISADKSISTAYLQWSSLKASDTAMYFCARQRTFYGDSSDYFDYWGQGTLVTVSS

SEQ ID NO: 310 - protein, 123 aa, Artificial Sequence
  Description of Artificial Sequence: Synthetic polypeptide
  VH Amino Acid Sequence Antibody ID V44 D09
EVQLVQSGAEVKKPGESLKISCKGSGYSFTSYWIAWVRQMPGKGLEWMGIIYPSDSDTRYSPSFQGQVTISADKSISTAYLQWSSLKASDTAMYFCARQRTFYYDSSDYFDYWGQGTLVTVSS

SEQ ID NO: 311 - protein, 123 aa, Artificial Sequence
  Description of Artificial Sequence: Synthetic polypeptide
  VH Amino Acid Sequence Antibody ID V68 F09
EVQLVQSGAEVKKPGESLKISCKGSGYSFTSYWIAWVRQMPGKGLEWMGIIYPGDSDTRYSPSFQGQVTISADKSISTAYLQWSSLKASDTAMYFCARQRTFRYDSSDYFDYWGQGTLVTVSS

SEQ ID NO: 312 - protein, 123 aa, Artificial Sequence
  Description of Artificial Sequence: Synthetic polypeptide
  VH Amino Acid Sequence Antibody ID V90 H07
EVQLVQSGAEVKKPGESLKISCKGSGYSFTSEWIAWVRQMPGKGLEWMGIIYPGDSDTRYSPSFQGQVTISADKSISTAYLQWSSLKASDTAMYFCARQRTFYYDSSDYFDYWGQGTLVTVSS

SEQ ID NO: 313 - DNA, 321 bp, Artificial Sequence
  Description of Artificial Sequence: Synthetic polynucleotide
  Anti-TREM2 Antibody Variable Region Nucleic Acid - LV Antibody ID V10 A11
gacatccagatgacccagtctccatcttccgtgtctgcatctgtaggagacagagtcaccatcacttgtcgggcgagtcagggtattagcagctggttagcctggtatcagcagaaaccagggaaagcccctaagctcctgatctattctgcatccagtttgcaaaatggggtcccatcaaggttcagcggcagtggatctgggacagatttcactctcaccatcagcagcctgcagcctgaagattttgcaacttacttttgtcaacaggctgacagtttccctcgcacttttggccaggggaccaagctggagatcaaa

SEQ ID NO: 314 - DNA, 321 bp, Artificial Sequence
  Description of Artificial Sequence: Synthetic polynucleotide
  Anti-TREM2 Antibody Variable Region Nucleic Acid - LV Antibody ID V23 B12
gacatccagatgacccagtctccatcttccgtgtctgcatctgtaggagacagagtcaccatcacttgtcgggcgagtcagggtattagcagctggttagcctggtatcagcagaaaccagggaaagcccctaagctcctgatctatgctgcatccagtttgcaaaatggggtcccatcaaggttcagcggcagtggatctgggacagatttcactctcaccatcagcagcctgcagcctgaagattttgcaacttacttttgtcaacaggctgacagtttccctcttacttttggccaggggaccaagctggagatcaaa

SEQ ID NO: 315 - DNA, 321 bp, Artificial Sequence
  Description of Artificial Sequence: Synthetic polynucleotide
  Anti-TREM2 Antibody Variable Region Nucleic Acid - LV Antibody ID V57 E10
gacatccagatgacccagtctccatcttccgtgtctgcatctgtaggagacagagtcaccatcacttgtgcggcgagtcagggtattagcagctggttagcctggtatcagcagaaaccagggaaagcccctaagctcctgatctatgctgcatccagtttgcaaaatggggtcccatcaaggttcagcggcagtggatctgggacagatttcactctcaccatcagcagcctgcagcctgaagattttgcaacttacttttgtcaacaggctgacagtttccctcgcacttttggccaggggaccaagctggagatcaaa

SEQ ID NO: 316 - DNA, 321 bp, Artificial Sequence
  Description of Artificial Sequence: Synthetic polynucleotide
  Anti-TREM2 Antibody Variable Region Nucleic Acid - LV Antibody ID V70 F11
gacatccagatgacccagtctccatcttccgtgtctgcatctgtaggagacagagtcaccatcacttgtcgggcgagtcagggtattagcagctggttagcctggtatcagcagaaaccagggaaagcccctaagctcctgatctatgctgcagggagtttgcaaaatggggtcccatcaaggttcagcggcagtggatctgggacagatttcactctcaccatcagcagcctgcagcctgaagattttgcaacttacttttgtcaacaggctgacagtttccctcgcacttttggccaggggaccaagctggagatcaaa

SEQ ID NO: 317 - DNA, 321 bp, Artificial Sequence
  Description of Artificial Sequence: Synthetic polynucleotide
  Anti-TREM2 Antibody Variable Region Nucleic Acid - LV Antibody ID V83
gacatccagatgacccagtctccatcttccgtgtctgcatctgtaggagacagagtcaccatcacttgtcgggcgagtcagggtattagcagctggttagcctggtatcagcagaaaccagggaaagcccctaagctcctgatctatgctgcatccagtttgcaaaatggggtcccatcaaggttcagcggcagtggatctgggacagatttcactctcaccatcagcagcctgcagcctgaagattttgcaacttacttttgtcaacaggctgtgagtttccctcgcacttttggccaggggaccaagctggagatcaaa

SEQ ID NO: 318 - DNA, 321 bp, Artificial Sequence
  Description of Artificial Sequence: Synthetic polynucleotide
  Anti-TREM2 Antibody Variable Region Nucleic Acid - LV Antibody ID V90 H07
gacatccagatgacccagtctccatcttccgtgtctgcatctgtaggagacagagtcaccatcacttgtcgggcgagtcagggtattagcagatggttagcctggtatcagcagaaaccagggaaagcccctaagctcctgatctatgctgcatccagtttgcaaaatggggtcccatcaaggttcagcggcagtggatctgggacagatttcactctcaccatcagcagcctgcagcctgaagattttgcaacttacttttgtcaacaggctgacagtttccctcgcacttttggccaggggaccaagctggagatcaaa

SEQ ID NO: 319 - DNA, 369 bp, Artificial Sequence
  Description of Artificial Sequence: Synthetic polynucleotide
  Anti-TREM2 Antibody Variable Region Nucleic Acid - HV Antibody ID V9 A10
gaggtgcagctggtgcagtctggagcagaggtgaaaaagcccggggagtctctgaagatctcctgtaagggttctggatacagttttaccagctactggatcgcctgggtgcgccagatgcccgggaaaggcctggagtggatggggatcatctatcctggtgactctgataccagatacagcccgtccttccaaggccaggtcaccatctcagccgacaagtccatcagcaccgcctacctacagtggagcagcctgaaggcctcggacaccgccatgtatttctgtgcgagacaaagggggttttattatgatagtagtgattattttgactactggggccagggaaccctggtcaccgtgtcctca

SEQ ID NO: 320 - DNA, 369 bp, Artificial Sequence
  Description of Artificial Sequence: Synthetic polynucleotide
  Anti-TREM2 Antibody Variable Region Nucleic Acid - HV Antibody ID V10 A11 V23 B12 V57 E10 V70 F11 V83 G12
gaggtgcagctggtgcagtctggagcagaggtgaaaaagcccggggagtctctgaagatctcctgtaagggttctggatacagttttaccagctactggatcgcctgggtgcgccagatgcccgggaaaggcctggagtggatggggatcatctatcctggtgactctgataccagatacagcccgtccttccaaggccaggtcaccatctcagccgacaagtccatcagcaccgcctacctacagtggagcagcctgaaggcctcggacaccgccatgtatttctgtgcgagacaaaggacgttttattatgatagtagtgattattttgactactggggccagggaaccctggtcaccgtgtcctca

SEQ ID NO: 321 - DNA, 369 bp, Artificial Sequence
  Description of Artificial Sequence: Synthetic polynucleotide
  Anti-TREM2 Antibody Variable Region Nucleic Acid - HV Antibody ID V30 C07
gaggtgcagctggtgcagtctggagcagaggtgaaaaagcccggggagtctctgaagatctcctgtaagggttctggatcgagttttaccagctactggatcgcctgggtgcgccagatgcccgggaaaggcctggagtggatggggatcatctatcctggtgactctgataccagatacagcccgtccttccaaggccaggtcaccatctcagccgacaagtccatcagcaccgcctacctacagtggagcagcctgaaggcctcggacaccgccatgtatttctgtgcgagacaaaggacgttttattatgatagtagtgattattttgactactggggccagggaaccctggtcaccgtgtcctca

SEQ ID NO: 322 - DNA, 369 bp, Artificial Sequence
  Description of Artificial Sequence: Synthetic polynucleotide
  Anti-TREM2 Antibody Variable Region Nucleic Acid - HV Antibody ID V33 C10
gaggtgcagctggtgcagtctggagcagaggtgaaaaagcccggggagtctctgaagatctcctgtaagggttctggatacagttttaccagctactggatcgcctgggtgcgccagatgcccgggaaaggcctggagtggatggggatcatctatcctggtgactctgataccagatacagcccgtccttccaaggccaggtcaccatctcagccgacaagtccatcagcaccgcctacctacagtggagcagcctgaaggcctcggacaccgccatgtatttctgtgcgagacaaaggacgttttatggggatagtagtgattattttgactactggggccagggaaccctggtcaccgtgtcctca

SEQ ID NO: 323 - DNA, 369 bp, Artificial Sequence
  Description of Artificial Sequence: Synthetic polynucleotide
  Anti-TREM2 Antibody Variable Region Nucleic Acid - HV Antibody ID V44 D09
gaggtgcagctggtgcagtctggagcagaggtgaaaaagcccggggagtctctgaagatctcctgtaagggttctggatacagttttaccagctactggatcgcctgggtgcgccagatgcccgggaaaggcctggagtggatggggatcatctatcctagtgactctgataccagatacagcccgtccttccaaggccaggtcaccatctcagccgacaagtccatcagcaccgcctacctacagtggagcagcctgaaggcctcggacaccgccatgtatttctgtgcgagacaaaggacgttttattatgatagtagtgattattttgactactggggccagggaaccctggtcaccgtgtcctca

SEQ ID NO: 324 - DNA, 369 bp, Artificial Sequence
  Description of Artificial Sequence: Synthetic polynucleotide
  Anti-TREM2 Antibody Variable Region Nucleic Acid - HV Antibody ID V68 F09
gaggtgcagctggtgcagtctggagcagaggtgaaaaagcccggggagtctctgaagatctcctgtaagggttctggatacagttttaccagctactggatcgcctgggtgcgccagatgcccgggaaaggcctggagtggatggggatcatctatcctggtgactctgataccagatacagcccgtccttccaaggccaggtcaccatctcagccgacaagtccatcagcaccgcctacctacagtggagcagcctgaaggcctcggacaccgccatgtatttctgtgcgagacaaaggacgtttaggtatgatagtagtgattattttgactactggggccagggaaccctggtcaccgtgtcctca

SEQ ID NO: 325 - DNA, 369 bp, Artificial Sequence
  Description of Artificial Sequence: Synthetic polynucleotide
  Anti-TREM2 Antibody Variable Region Nucleic Acid - HV Antibody ID V90 H07
gaggtgcagctggtgcagtctggagcagaggtgaaaaagcccggggagtctctgaagatctcctgtaagggttctggatacagttttaccagcgagtggatcgcctgggtgcgccagatgcccgggaaaggcctggagtggatggggatcatctatcctggtgactctgataccagatacagcccgtccttccaaggccaggtcaccatctcagccgacaagtccatcagcaccgcctacctacagtggagcagcctgaaggcctcggacaccgccatgtatttctgtgcgagacaaaggacgttttattatgatagtagtgattattttgactactggggccagggaaccctggtcaccgtgtcctca

SEQ ID NO: 326 - protein, 113 aa, Artificial Sequence
  Description of Artificial Sequence: Synthetic polypeptide
  LC variable region sequence 24G6
DIVMTQSPDSLAVSLGERATINCKSSQSVLYSSNNKHFLAWYQQKPGQPPKLLIYWASTRESGVPDRFSGSGSGTDFTLTISSLQAEDVAVYYCQQYYSTPLTFGGGTKVEIK

SEQ ID NO: 327 - protein, 119 aa, Artificial Sequence
  Description of Artificial Sequence: Synthetic polypeptide
  HC variable region sequence 24G6
EVQLLESGGGLVQPGGSLRLSCAASGFTFSSYAMSWVRQAPGKGLEWVSAISGSGGSTYYAESVKGRFTISRDNSKNTLYLQMNSLRAEDTAVYYCAKAYTPMAFFDYWGQGTLVTVSS

SEQ ID NO: 328 - protein, 107 aa, Artificial Sequence
  Description of Artificial Sequence: Synthetic polypeptide
  LC variable region sequence 6E7
DIQMTQSPSSVSASVGDRVTITCRASQGISSWLAWYQQKPGKAPKLLIYAASSLQSGVPSRFSGSGSGTDFTLTISSLQPEDFATYFCQQADAFPRTFGQGTKLEIK

SEQ ID NO: 329 - protein, 123 aa, Artificial Sequence
  Description of Artificial Sequence: Synthetic polypeptide
  HC variable region sequence 6E7
EVQLVQSGAEVKKPGESLKISCKGSGYSFTSYWIAWVRQMPGKGLEWMGIIYPGDADARYSPSFQGQVTISADKSISTAYLQWSSLKASDTAMYFCARQRTFYYDSSDYFDYWGQGTLVTVSS

SEQ ID NO: 330 - protein, 107 aa, Artificial Sequence
  Description of Artificial Sequence: Synthetic polypeptide
  LC variable region sequence 13E7
EIVMTQSPATLSVSPGERATLSCRASQSVSSNLAWFQQKPGQAPRLLIYGASTRATGIPARFSGSGSGTEFTLTISSLQPEDFAVYYCLQDNNFPPTFGQGTKVDIK

SEQ ID NO: 331 - protein, 121 aa, Artificial Sequence
  Description of Artificial Sequence: Synthetic polypeptide
  HC variable region sequence 13E7
EVQLVQSGAEVKKPGESLKISCKGSGYSFTSYWIGWVRQMPGKGLEWMGIIYPGDADARYSPSFQGQVTISADKSISTAYLQWSSLKASDTAMYFCARRRQGIFGDALDFWGQGTLVTVSS

SEQ ID NO: 332 - protein, 107 aa, Artificial Sequence
  Description of Artificial Sequence: Synthetic polypeptide
  LC variable region sequence 5E3
DIQMTQSPSSLSASVGDRVTITCRASQGISNYLAWYQQKPGKAPKSLIYAASSLQSGVPSRFSGSGSGTDFTLTISSLQPEDFATYYCQQYSTYPFTFGQGTKVDIK

SEQ ID NO: 333 - protein, 121 aa, Artificial Sequence
  Description of Artificial Sequence: Synthetic polypeptide
  HC variable region sequence 5E3
QVQLVQSGAEVKKPGASVKVSCKASGYTFTGYYIHWVRQAPGQGLEWMGWINPYSGGTTSAQKFQGRVTMTRDTSTSSAYMELSRLRSDDTAVYYCARDAGYLALYGTDVWGQGTLVTVSS

SEQ ID NO: 334 - protein, 242 aa, Artificial Sequence
  Description of Artificial Sequence: Synthetic polypeptide
  AA sequence LC SST28347
MDMRVPAQLLGLLLLWLRGARCDIVMTQSPDSLAVSLGERATINCKSSQSVLYSSNNKHFLAWYQQKPGQPPKLLIYWASTRESGVPDRFSGSGSGTDFTLTISSLQAEDVAVYYCQQYYSTPLTFGGGTKVEIKRTVAAPSVFIFPPSDEQLKSGTASVVCLLNNFYPREAKVQWKVDNALQSGNSQESVTEQDSKDSTYSLSSTLTLSKADYEKHKVYACEVTHQGLSSPVTKSFNRGEC

SEQ ID NO: 335 - protein, 471 aa, Artificial Sequence
  Description of Artificial Sequence: Synthetic polypeptide
  AA sequence HC SST28347
MDMRVPAQLLGLLLLWLRGARCEVQLLESGGGLVQPGGSLRLSCAASGFTFSSYAMSWVRQAPGKGLEWVSAISGSGGSTYYAESVKGRFTISRDNSKNTLYLQMNSLRAEDTAVYYCAKAYTPMAFFDYWGQGTLVTVSSASTKGPSVFPLAPSSKSTSGGTAALGCLVKDYFPEPVTVSWNSGALTSGVHTFPAVLQSSGLYSLSSVVTVPSSSLGTQTYICNVNHKPSNTKVDKKVEPKSCDKTHTCPPCPAPELLGGPSVFLFPPKPKDTLMISRTPEVTCVVVDVSHEDPEVKFNWYVDGVEVHNAKTKPCEEQYGSTYRCVSVLTVLHQDWLNGKEYKCKVSNKALPAPIEKTISKAKGQPREPQVYTLPPSREEMTKNQVSLTCLVKGFYPSDIAVEWESNGQPENNYKTTPPVLDSDGSFFLYSKLTVDKSRWQQGNVFSCSVMHEALHNHYTQKSLSLSPGK

SEQ ID NO: 336 - protein, 468 aa, Artificial Sequence
  Description of Artificial Sequence: Synthetic polypeptide
  AA sequence HC SST204812
MDMRVPAQLLGLLLLWLRGARCEVQLLESGGGLVQPGGSLRLSCAASGFTFSSYAMSWVRQAPGKGLEWVSAISGSGGSTYYAESVKGRFTISRDNSKNTLYLQMNSLRAEDTAVYYCAKAYTPMAFFDYWGQGTLVTVSSASTKGPSVFPLAPSSRSTSESTAALGCLVKDYFPEPVTVSWNSGALTSGVHTFPAVLQSSGLYSLSSVVTVPSSNFGTQTYTCNVDHKPSNTKVDKTVERKCCVECPPCPAPELLGGPSVFLFPPKPKDTLMISRTPEVTCVVVDVSHEDPEVKFNWYVDGVEVHNAKTKPCEEQYGSTYRCVSVLTVLHQDWLNGKEYKCKVSNKALPAPIEKTISKAKGQPREPQVYTLPPSREEMTKNQVSLTCLVKGFYPSDIAVEWESNGQPENNYKTTPPVLDSDGSFFLYSKLTVDKSRWQQGNVFSCSVMHEALHNHYTQKSLSLSPGK

SEQ ID NO: 337 - protein, 236 aa, Artificial Sequence
  Description of Artificial Sequence: Synthetic polypeptide
  AA sequence SST29857
MDMRVPAQLLGLLLLWLRGARCDIQMTQSPSSVSASVGDRVTITCRASQGISSWLAWYQQKPGKAPKLLIYAASSLQSGVPSRFSGSGSGTDFTLTISSLQPEDFATYFCQQADAFPRTFGQGTKLEIKRTVAAPSVFIFPPSDEQLKSGTASVVCLLNNFYPREAKVQWKVDNALQSGNSQESVTEQDSKDSTYSLSSTLTLSKADYEKHKVYACEVTHQGLSSPVTKSFNRGEC

SEQ ID NO: 338 - protein, 472 aa, Artificial Sequence
  Description of Artificial Sequence: Synthetic polypeptide
  AA sequence LC SST29857
MDMRVPAQLLGLLLLWLRGARCEVQLVQSGAEVKKPGESLKISCKGSGYSFTSYWIAWVRQMPGKGLEWMGIIYPGDADARYSPSFQGQVTISADKSISTAYLQWSSLKASDTAMYFCARQRTFYYDSSDYFDYWGQGTLVTVSSASTKGPSVFPLAPSSRSTSESTAALGCLVKDYFPEPVTVSWNSGALTSGVHTFPAVLQSSGLYSLSSVVTVPSSNFGTQTYTCNVDHKPSNTKVDKTVERKCCVECPPCPAPELLGGPSVFLFPPKPKDTLMISRTPEVTCVVVDVSHEDPEVKFNWYVDGVEVHNAKTKPCEEQYGSTYRCVSVLTVLHQDWLNGKEYKCKVSNKALPAPIEKTISKAKGQPREPQVYTLPPSREEMTKNQVSLTCLVKGFYPSDIAVEWESNGQPENNYKTTPPVLDSDGSFFLYSKLTVDKSRWQQGNVFSCSVMHEALHNHYTQKSLSLSPGK

SEQ ID NO: 339 - protein, 236 aa, Artificial Sequence
  Description of Artificial Sequence: Synthetic polypeptide
  AA sequence LC SST202443
MDMRVPAQLLGLLLLWLRGARCEIVMTQSPATLSVSPGERATLSCRASQSVSSNLAWFQQKPGQAPRLLIYGASTRATGIPARFSGSGSGTEFTLTISSLQPEDFAVYYCLQDNNFPPTFGQGTKVDIKRTVAAPSVFIFPPSDEQLKSGTASVVCLLNNFYPREAKVQWKVDNALQSGNSQESVTEQDSKDSTYSLSSTLTLSKADYEKHKVYACEVTHQGLSSPVTKSFNRGEC

SEQ ID NO: 340 - protein, 473 aa, Artificial Sequence
  Description of Artificial Sequence: Synthetic polypeptide
  AA sequence HC SST202443
MDMRVPAQLLGLLLLWLRGARCEVQLVQSGAEVKKPGESLKISCKGSGYSFTSYWIGWVRQMPGKGLEWMGIIYPGDADARYSPSFQGQVTISADKSISTAYLQWSSLKASDTAMYFCARRRQGIFGDALDFWGQGTLVTVSSASTKGPSVFPLAPSSKSTSGGTAALGCLVKDYFPEPVTVSWNSGALTSGVHTFPAVLQSSGLYSLSSVVTVPSSSLGTQTYICNVNHKPSNTKVDKKVEPKSCDKTHTCPPCPAPELLGGPSVFLFPPKPKDTLMISRTPEVTCVVVDVSHEDPEVKFNWYVDGVEVHNAKTKPCEEQYGSTYRCVSVLTVLHQDWLNGKEYKCKVSNKALPAPIEKTISKAKGQPREPQVYTLPPSREEMTKNQVSLTCLVKGFYPSDIAVEWESNGQPENNYKTTPPVLDSDGSFFLYSKLTVDKSRWQQGNVFSCSVMHEALHNHYTQKSLSLSPGK

SEQ ID NO: 341 - protein, 236 aa, Artificial Sequence
  Description of Artificial Sequence: Synthetic polypeptide
  AA sequence LC SST29825
MDMRVPAQLLGLLLLWLRGARCDIQMTQSPSSLSASVGDRVTITCRASQGISNYLAWYQQKPGKAPKSLIYAASSLQSGVPSRFSGSGSGTDFTLTISSLQPEDFATYYCQQYSTYPFTFGQGTKVDIKRTVAAPSVFIFPPSDEQLKSGTASVVCLLNNFYPREAKVQWKVDNALQSGNSQESVTEQDSKDSTYSLSSTLTLSKADYEKHKVYACEVTHQGLSSPVTKSFNRGEC

SEQ ID NO: 342 - protein, 470 aa, Artificial Sequence
  Description of Artificial Sequence: Synthetic polypeptide
  AA sequence HC SST29825
MDMRVPAQLLGLLLLWLRGARCQVQLVQSGAEVKKPGASVKVSCKASGYTFTGYYIHWVRQAPGQGLEWMGWINPYSGGTTSAQKFQGRVTMTRDTSTSSAYMELSRLRSDDTAVYYCARDAGYLALYGTDVWGQGTLVTVSSASTKGPSVFPLAPSSRSTSESTAALGCLVKDYFPEPVTVSWNSGALTSGVHTFPAVLQSSGLYSLSSVVTVPSSNFGTQTYTCNVDHKPSNTKVDKTVERKCCVECPPCPAPELLGGPSVFLFPPKPKDTLMISRTPEVTCVVVDVSHEDPEVKFNWYVDGVEVHNAKTKPCEEQYGSTYRCVSVLTVLHQDWLNGKEYKCKVSNKALPAPIEKTISKAKGQPREPQVYTLPPSREEMTKNQVSLTCLVKGFYPSDIAVEWESNGQPENNYKTTPPVLDSDGSFFLYSKLTVDKSRWQQGNVFSCSVMHEALHNHYTQKSLSLSPGK

SEQ ID NO: 343 - DNA, 339 bp, Artificial Sequence
  Description of Artificial Sequence: Synthetic polynucleotide
  LC variable region sequence SST28347 and SST204812
gacatcgtgatgacccagtctccagactccctggctgtgtctctgggcgagagggccaccatcaactgcaagtccagccagagtgttttatacagctccaacaataagcacttcttagcttggtaccagcagaaaccaggacagcctcctaagctgctcatttactgggcatctacccgggagtccggggtccctgaccgattcagtggcagcgggtctgggacagatttcactctcaccatcagcagcctgcaggctgaagatgtggcagtttattactgtcagcaatattatagtactccgctcactttcggcggagggaccaaggtggagatcaaa

SEQ ID NO: 344 - DNA, 357 bp, Artificial Sequence
  Description of Artificial Sequence: Synthetic polynucleotide
  HC variable region sequence SST28347 and SST204812
gaggtgcagctgttggagtctgggggaggcttggtacagcctggggggtccctgagactctcctgtgcagcctctggattcacctttagcagctatgccatgagctgggtccgccaggctccagggaagggactggagtgggtctcagctattagtggtagtggtggtagcacatactacgcagaatccgtgaagggccggttcaccatctccagagacaattccaagaacacgctgtatctgcaaatgaacagcctgagagccgaggacacggccgtatattactgtgcgaaggcgtatacacctatggcattctttgactactggggccagggaaccctggtcaccgtctcctca

SEQ ID NO: 345 - DNA, 321 bp, Artificial Sequence
  Description of Artificial Sequence: Synthetic polynucleotide
  LC variable region sequence SST29857
gacatccagatgacccagtctccatcttccgtgtctgcatctgtaggagacagagtcaccatcacttgtcgggcgagtcagggtattagcagctggttagcctggtatcagcagaaaccagggaaagcccctaagctcctgatctatgctgcatccagtttgcaaagtggggtcccatcaaggttcagcggcagtggatctgggacagatttcactctcaccatcagcagcctgcagcctgaagattttgcaacttacttttgtcaacaggctgacgctttccctcgcacttttggccaggggaccaagctggagatcaaa

SEQ ID NO: 346 - DNA, 369 bp, Artificial Sequence
  Description of Artificial Sequence: Synthetic polynucleotide
  HC variable region sequence SST29857
gaggtgcagctggtgcagtctggagcagaggtgaaaaagcccggggagtctctgaagatctcctgtaagggttctggatacagttttaccagctactggatcgcctgggtgcgccagatgcccgggaaaggcctggagtggatggggatcatctatcctggtgacgctgatgccagatacagcccgtccttccaaggccaggtcaccatctcagccgacaagtccatcagcaccgcctacctacagtggagcagcctgaaggcctcggacaccgccatgtatttctgtgcgagacaaaggacgttttattatgatagtagtgattattttgactactggggccagggaaccctggtcaccgtgtcctca

SEQ ID NO: 347 - DNA, 321 bp, Artificial Sequence
  Description of Artificial Sequence: Synthetic polynucleotide
  LC variable region sequence SST202443
gaaatagtgatgacgcagtctccagccaccctgtctgtgtctccaggggaaagagccaccctctcctgcagggccagtcagagtgttagcagcaacttagcctggttccagcagaaacctggccaggctcccaggctcctcatctatggtgcttccaccagggccactggtattccagccaggttcagtggcagtgggtctgggacagagttcactctcaccatcagcagcctgcagcctgaagattttgcagtttattactgtctgcaggataataatttccctcccactttcggccaagggaccaaagtggatatcaaa

SEQ ID NO: 348 - DNA, 363 bp, Artificial Sequence
  Description of Artificial Sequence: Synthetic polynucleotide
  HC variable region sequence SST202443
gaggtgcagctggtgcagtctggagcagaggtgaaaaagcccggggagtctctgaagatctcctgtaagggttctggatacagctttaccagctactggatcggctgggtgcgccagatgcccgggaaaggcctggagtggatggggatcatctatcctggagatgctgatgccagatacagcccgtccttccaaggccaggtcaccatctcagccgacaagtccatcagcaccgcctacctgcagtggagcagcctgaaggcctcggacaccgccatgtatttctgtgcgaggcggagacaggggatcttcggtgatgctcttgatttctggggccaagggacattggtcaccgtgtcttca

SEQ ID NO: 349 - DNA, 321 bp, Artificial Sequence
  Description of Artificial Sequence: Synthetic polynucleotide
  LC variable region sequence SST29825
gacatccagatgacccagtctccatcctcactgtctgcatctgtaggagacagagtcaccatcacttgtcgggcgagtcagggcattagcaattatttagcctggtatcagcagaaaccagggaaagcccctaaatccctgatctatgctgcatccagtttgcaaagtggggtcccatcaaggttcagcggcagtggatctgggacagatttcactctcaccatcagcagcctgcagcctgaagattttgcaacttattactgccaacagtatagtacttacccattcactttcggccaagggaccaaagtggatatcaaa

SEQ ID NO: 350 - DNA, 363 bp, Artificial Sequence
  Description of Artificial Sequence: Synthetic polynucleotide
  HC variable region sequence SST29825
caggtgcagctggtgcagtctggggctgaggtgaagaagcctggggcctcagtgaaggtgtcctgcaaggcttctggatacaccttcaccggctactatatccactgggtgcgacaggcccctggacaagggcttgagtggatgggatggatcaacccttacagtggtggcacaacctctgcacagaagtttcagggcagggtcaccatgaccagggacacgtccaccagctcagcctacatggaactgagcaggctgagatctgacgacacggccgtgtattactgtgcgagagatgcaggctacctggccctctacggtacggacgtctggggccaagggaccttggtcaccgtgtcctca

SEQ ID NO: 351 - DNA, 726 bp, Artificial Sequence
  Description of Artificial Sequence: Synthetic polynucleotide
  NA sequence LC SST28347
atggacatgagggtgcccgctcagctcctggggctcctgctgctgtggctgagaggtgcgcgctgtgacatcgtgatgacccagtctccagactccctggctgtgtctctgggcgagagggccaccatcaactgcaagtccagccagagtgttttatacagctccaacaataagcacttcttagcttggtaccagcagaaaccaggacagcctcctaagctgctcatttactgggcatctacccgggagtccggggtccctgaccgattcagtggcagcgggtctgggacagatttcactctcaccatcagcagcctgcaggctgaagatgtggcagtttattactgtcagcaatattatagtactccgctcactttcggcggagggaccaaggtggagatcaaacgaacggtggctgcaccatctgtcttcatcttcccgccatctgatgagcagttgaaatctggaactgcctctgttgtgtgcctgctgaataacttctatcccagagaggccaaagtacagtggaaggtggataacgccctccaatcgggtaactcccaggagagtgtcacagagcaggacagcaaggacagcacctacagcctcagcagcaccctgacgctgagcaaagcagactacgagaaacacaaagtctacgcctgcgaagtcacccatcagggcctgagctcgcccgtcacaaagagcttcaacaggggagagtgt

SEQ ID NO: 352 - DNA, 1413 bp, Artificial Sequence
  Description of Artificial Sequence: Synthetic polynucleotide
  NA sequence HC SST28347
atggacatgagggtgcccgctcagctcctggggctcctgctgctgtggctgagaggtgcgcgctgtgaggtgcagctgttggagtctgggggaggcttggtacagcctggggggtccctgagactctcctgtgcagcctctggattcacctttagcagctatgccatgagctgggtccgccaggctccagggaagggactggagtgggtctcagctattagtggtagtggtggtagcacatactacgcagaatccgtgaagggccggttcaccatctccagagacaattccaagaacacgctgtatctgcaaatgaacagcctgagagccgaggacacggccgtatattactgtgcgaaggcgtatacacctatggcattctttgactactggggccagggaaccctggtcaccgtctcctcagcctccaccaagggcccatcggtcttccccctggcaccctcctccaagagcacctctgggggcacagcggccctgggctgcctggtcaaggactacttccccgaaccggtgacggtgtcgtggaactcaggcgccctgaccagcggcgtgcacaccttcccggctgtcctacagtcctcaggactctactccctcagcagcgtggtgaccgtgccctccagcagcttgggcacccagacctacatctgcaacgtgaatcacaagcccagcaacaccaaggtggacaagaaagttgagcccaaatcttgtgacaaaactcacacatgcccaccgtgcccagcacctgaactcctggggggaccgtcagtcttcctcttccccccaaaacccaaggacaccctcatgatctcccggacccctgaggtcacatgcgtggtggtggacgtgagccacgaagaccctgaggtcaagttcaactggtacgtggacggcgtggaggtgcataatgccaagacaaagccgtgcgaggagcagtacggcagcacgtaccgttgcgtcagcgtcctcaccgtcctgcaccaggactggctgaatggcaaggagtacaagtgcaaggtgtccaacaaagccctcccagcccccatcgagaaaaccatctccaaagccaaagggcagccccgagaaccacaggtgtacaccctgcccccatcccgggaggagatgaccaagaaccaggtcagcctgacctgcctggtcaaaggcttctatcccagcgacatcgccgtggagtgggagagcaatgggcagccggagaacaactacaagaccacgcctcccgtgctggactccgacggctccttcttcctctatagcaagctcaccgtggacaagagcaggtggcagcaggggaacgtcttctcatgctccgtgatgcatgaggctctgcacaaccactacacgcagaagagcctctccctgtctccgggcaaa

SEQ ID NO: 353 - DNA, 1404 bp, Artificial Sequence
  Description of Artificial Sequence: Synthetic polynucleotide
  NA sequence HC SST204812
atggacatgagggtgcccgctcagctcctggggctcctgctgctgtggctgagaggtgcgcgctgtgaggtgcagctgttggagtctgggggaggcttggtacagcctggggggtccctgagactctcctgtgcagcctctggattcacctttagcagctatgccatgagctgggtccgccaggctccagggaagggactggagtgggtgtcagctattagtggtagtggtggtagcacatactacgcagaatccgtgaagggccggttcaccatctccagagacaattccaagaacacgctgtatctgcaaatgaacagcctgagagccgaggacacggccgtatattactgtgcgaaggcgtatacacctatggcattctttgactactggggccagggaaccctggtcaccgtgtcctcagcctccaccaagggcccatcggtcttccccctggcgcccagctccaggagcacctccgagagcacagcggccctgggctgcctggtcaaggactacttccccgaaccggtgacggtgtcgtggaactcaggcgctctgaccagcggcgtgcacaccttcccagctgtcctacagtcctcaggactctactccctcagcagcgtggtgaccgtgccctccagcaacttcggcacccagacctacacctgcaacgtagatcacaagcccagcaacaccaaggtggacaagacagttgagcgcaaatgttgtgtcgagtgcccaccgtgcccagcacctgaactcctggggggaccgtcagtcttcctcttccccccaaaacccaaggacaccctcatgatctcccggacccctgaggtcacatgcgtggtggtggacgtgagccacgaagaccctgaggtcaagttcaactggtacgtggacggcgtggaggtgcataatgccaagacaaagccgtgcgaggagcagtacggcagcacgtaccgttgcgtcagcgtcctcaccgtcctgcaccaggactggctgaatggcaaggagtacaagtgcaaggtgtccaacaaagccctcccagcccccatcgagaaaaccatctccaaagccaaagggcagccccgagaaccacaggtgtacaccctgcccccatcccgggaggagatgaccaagaaccaggtcagcctgacctgcctggtcaaaggcttctatcccagcgacatcgccgtggagtgggagagcaatgggcagccggagaacaactacaagaccacgcctcccgtgctggactccgacggctccttcttcctctatagcaagctcaccgtggacaagagcaggtggcagcaggggaacgtcttctcatgctccgtgatgcatgaggctctgcacaaccactacacgcagaagagcctctccctgtctccgggcaaa

SEQ ID NO: 354 - DNA, 708 bp, Artificial Sequence
  Description of Artificial Sequence: Synthetic polynucleotide
  NA sequence LC SST29857
atggacatgagggtgcccgctcagctcctggggctcctgctgctgtggctgagaggtgcgcgctgtgacatccagatgacccagtctccatcttccgtgtctgcatctgtaggagacagagtcaccatcacttgtcgggcgagtcagggtattagcagctggttagcctggtatcagcagaaaccagggaaagcccctaagctcctgatctatgctgcatccagtttgcaaagtggggtcccatcaaggttcagcggcagtggatctgggacagatttcactctcaccatcagcagcctgcagcctgaagattttgcaacttacttttgtcaacaggctgacgctttccctcgcacttttggccaggggaccaagctggagatcaaacgaacggtggctgcaccatctgtcttcatcttcccgccatctgatgagcagttgaaatctggaactgcctctgttgtgtgcctgctgaataacttctatcccagagaggccaaagtacagtggaaggtggataacgccctccaatcgggtaactcccaggagagtgtcacagagcaggacagcaaggacagcacctacagcctcagcagcaccctgacgctgagcaaagcagactacgagaaacacaaagtctacgcctgcgaagtcacccatcagggcctgagctcgcccgtcacaaagagcttcaacaggggagagtgt

SEQ ID NO: 355 - DNA, 1416 bp, Artificial Sequence
  Description of Artificial Sequence: Synthetic polynucleotide
  NA sequence HC SST29857
atggacatgagggtgcccgctcagctcctggggctcctgctgctgtggctgagaggtgcgcgctgtgaggtgcagctggtgcagtctggagcagaggtgaaaaagcccggggagtctctgaagatctcctgtaagggttctggatacagttttaccagctactggatcgcctgggtgcgccagatgcccgggaaaggcctggagtggatggggatcatctatcctggtgacgctgatgccagatacagcccgtccttccaaggccaggtcaccatctcagccgacaagtccatcagcaccgcctacctacagtggagcagcctgaaggcctcggacaccgccatgtatttctgtgcgagacaaaggacgttttattatgatagtagtgattattttgactactggggccagggaaccctggtcaccgtgtcctcagcctccaccaagggcccatcggtcttccccctggcgcccagctccaggagcacctccgagagcacagcggccctgggctgcctggtcaaggactacttccccgaaccggtgacggtgtcgtggaactcaggcgctctgaccagcggcgtgcacaccttcccagctgtcctacagtcctcaggactctactccctcagcagcgtggtgaccgtgccctccagcaacttcggcacccagacctacacctgcaacgtagatcacaagcccagcaacaccaaggtggacaagacagttgagcgcaaatgttgtgtcgagtgcccaccgtgcccagcacctgaactcctggggggaccgtcagtcttcctcttccccccaaaacccaaggacaccctcatgatctcccggacccctgaggtcacatgcgtggtggtggacgtgagccacgaagaccctgaggtcaagttcaactggtacgtggacggcgtggaggtgcataatgccaagacaaagccgtgcgaggagcagtacggcagcacgtaccgttgcgtcagcgtcctcaccgtcctgcaccaggactggctgaatggcaaggagtacaagtgcaaggtgtccaacaaagccctcccagcccccatcgagaaaaccatctccaaagccaaagggcagccccgagaaccacaggtgtacaccctgcccccatcccgggaggagatgaccaagaaccaggtcagcctgacctgcctggtcaaaggcttctatcccagcgacatcgccgtggagtgggagagcaatgggcagccggagaacaactacaagaccacgcctcccgtgctggactccgacggctccttcttcctctatagcaagctcaccgtggacaagagcaggtggcagcaggggaacgtcttctcatgctccgtgatgcatgaggctctgcacaaccactacacgcagaagagcctctccctgtctccgggcaaa

SEQ ID NO: 356 - DNA, 708 bp, Artificial Sequence
  Description of Artificial Sequence: Synthetic polynucleotide
  NA sequence LC SST202443
atggacatgagggtgcccgctcagctcctggggctcctgctgctgtggctgagaggtgcgcgctgtgaaatagtgatgacgcagtctccagccaccctgtctgtgtctccaggggaaagagccaccctctcctgcagggccagtcagagtgttagcagcaacttagcctggttccagcagaaacctggccaggctcccaggctcctcatctatggtgcttccaccagggccactggtattccagccaggttcagtggcagtgggtctgggacagagttcactctcaccatcagcagcctgcagcctgaagattttgcagtttattactgtctgcaggataataatttccctcccactttcggccaagggaccaaagtggatatcaaacgaacggtggctgcaccatctgtcttcatcttcccgccatctgatgagcagttgaaatctggaactgcctctgttgtgtgcctgctgaataacttctatcccagagaggccaaagtacagtggaaggtggataacgccctccaatcgggtaactcccaggagagtgtcacagagcaggacagcaaggacagcacctacagcctcagcagcaccctgacgctgagcaaagcagactacgagaaacacaaagtctacgcctgcgaagtcacccatcagggcctgagctcgcccgtcacaaagagcttcaacaggggagagtgt

SEQ ID NO: 357 - DNA, 1419 bp, Artificial Sequence
  Description of Artificial Sequence: Synthetic polynucleotide
  NA sequence HC SST202443
atggacatgagggtgcccgctcagctcctggggctcctgctgctgtggctgagaggtgcgcgctgtgaggtgcagctggtgcagtctggagcagaggtgaaaaagcccggggagtctctgaagatctcctgtaagggttctggatacagctttaccagctactggatcggctgggtgcgccagatgcccgggaaaggcctggagtggatggggatcatctatcctggagatgctgatgccagatacagcccgtccttccaaggccaggtcaccatctcagccgacaagtccatcagcaccgcctacctgcagtggagcagcctgaaggcctcggacaccgccatgtatttctgtgcgaggcggagacaggggatcttcggtgatgctcttgatttctggggccaagggacattggtcaccgtgtcttcagcctccaccaagggcccatcggtcttccccctggcaccctcctccaagagcacctctgggggcacagcggccctgggctgcctggtcaaggactacttccccgaaccggtgacggtgtcgtggaactcaggcgccctgaccagcggcgtgcacaccttcccggctgtcctacagtcctcaggactctactccctcagcagcgtggtgaccgtgccctccagcagcttgggcacccagacctacatctgcaacgtgaatcacaagcccagcaacaccaaggtggacaagaaagttgagcccaaatcttgtgacaaaactcacacatgcccaccgtgcccagcacctgaactcctggggggaccgtcagtcttcctcttccccccaaaacccaaggacaccctcatgatctcccggacccctgaggtcacatgcgtggtggtggacgtgagccacgaagaccctgaggtcaagttcaactggtacgtggacggcgtggaggtgcataatgccaagacaaagccgtgcgaggagcagtacggcagcacgtaccgttgcgtcagcgtcctcaccgtcctgcaccaggactggctgaatggcaaggagtacaagtgcaaggtgtccaacaaagccctcccagcccccatcgagaaaaccatctccaaagccaaagggcagccccgagaaccacaggtgtacaccctgcccccatcccgggaggagatgaccaagaaccaggtcagcctgacctgcctggtcaaaggcttctatcccagcgacatcgccgtggagtgggagagcaatgggcagccggagaacaactacaagaccacgcctcccgtgctggactccgacggctccttcttcctctatagcaagctcaccgtggacaagagcaggtggcagcaggggaacgtcttctcatgctccgtgatgcatgaggctctgcacaaccactacacgcagaagagcctctccctgtctccgggcaaa

SEQ ID NO: 358 - DNA, 708 bp, Artificial Sequence
  Description of Artificial Sequence: Synthetic polynucleotide
  NA sequence LC SST29825
atggacatgagggtgcccgctcagctcctggggctcctgctgctgtggctgagaggtgcgcgctgtgacatccagatgacccagtctccatcctcactgtctgcatctgtaggagacagagtcaccatcacttgtcgggcgagtcagggcattagcaattatttagcctggtatcagcagaaaccagggaaagcccctaaatccctgatctatgctgcatccagtttgcaaagtggggtcccatcaaggttcagcggcagtggatctgggacagatttcactctcaccatcagcagcctgcagcctgaagattttgcaacttattactgccaacagtatagtacttacccattcactttcggccaagggaccaaagtggatatcaaacgaacggtggctgcaccatctgtcttcatcttcccgccatctgatgagcagttgaaatctggaactgcctctgttgtgtgcctgctgaataacttctatcccagagaggccaaagtacagtggaaggtggataacgccctccaatcgggtaactcccaggagagtgtcacagagcaggacagcaaggacagcacctacagcctcagcagcaccctgacgctgagcaaagcagactacgagaaacacaaagtctacgcctgcgaagtcacccatcagggcctgagctcgcccgtcacaaagagcttcaacaggggagagtgt

SEQ ID NO: 359 - DNA, 1410 bp, Artificial Sequence
  Description of Artificial Sequence: Synthetic polynucleotide
  NA sequence HC SST29825
atggacatgagggtgcccgctcagctcctggggctcctgctgctgtggctgagaggtgcgcgctgtcaggtgcagctggtgcagtctggggctgaggtgaagaagcctggggcctcagtgaaggtgtcctgcaaggcttctggatacaccttcaccggctactatatccactgggtgcgacaggcccctggacaagggcttgagtggatgggatggatcaacccttacagtggtggcacaacctctgcacagaagtttcagggcagggtcaccatgaccagggacacgtccaccagctcagcctacatggaactgagcaggctgagatctgacgacacggccgtgtattactgtgcgagagatgcaggctacctggccctctacggtacggacgtctggggccaagggaccttggtcaccgtgtcctcagcctccaccaagggcccatcggtcttccccctggcgcccagctccaggagcacctccgagagcacagcggccctgggctgcctggtcaaggactacttccccgaaccggtgacggtgtcgtggaactcaggcgctctgaccagcggcgtgcacaccttcccagctgtcctacagtcctcaggactctactccctcagcagcgtggtgaccgtgccctccagcaacttcggcacccagacctacacctgcaacgtagatcacaagcccagcaacaccaaggtggacaagacagttgagcgcaaatgttgtgtcgagtgcccaccgtgcccagcacctgaactcctggggggaccgtcagtcttcctcttccccccaaaacccaaggacaccctcatgatctcccggacccctgaggtcacatgcgtggtggtggacgtgagccacgaagaccctgaggtcaagttcaactggtacgtggacggcgtggaggtgcataatgccaagacaaagccgtgcgaggagcagtacggcagcacgtaccgttgcgtcagcgtcctcaccgtcctgcaccaggactggctgaatggcaaggagtacaagtgcaaggtgtccaacaaagccctcccagcccccatcgagaaaaccatctccaaagccaaagggcagccccgagaaccacaggtgtacaccctgcccccatcccgggaggagatgaccaagaaccaggtcagcctgacctgcctggtcaaaggcttctatcccagcgacatcgccgtggagtgggagagcaatgggcagccggagaacaactacaagaccacgcctcccgtgctggactccgacggctccttcttcctctatagcaagctcaccgtggacaagagcaggtggcagcaggggaacgtcttctcatgctccgtgatgcatgaggctctgcacaaccactacacgcagaagagcctctccctgtctccgggcaaa

SEQ ID NO: 360 - protein, 10 aa, Artificial Sequence
  Description of Artificial Sequence: Synthetic peptide
  Peptides from epitope mapping experiments
HRDAGDLWFP

SEQ ID NO: 361 - protein, 9 aa, Artificial Sequence
  Description of Artificial Sequence: Synthetic peptide
  Peptides from epitope mapping experiments
AGDLWFPGE

SEQ ID NO: 362 - protein, 10 aa, Artificial Sequence
  Description of Artificial Sequence: Synthetic peptide
  Peptides from epitope mapping experiments
GDLWFPGESE

SEQ ID NO: 363 - protein, 14 aa, Artificial Sequence
  Description of Artificial Sequence: Synthetic peptide
  Peptides from epitope mapping experiments
HRDAGDLWFPGESE

SEQ ID NO: 364 - protein, 17 aa, Artificial Sequence
  Description of Artificial Sequence: Synthetic peptide
  Peptides from epitope mapping experiments
PLDHRDAGDLWFPGESE

SEQ ID NO: 365 - protein, 17 aa, Artificial Sequence
  Description of Artificial Sequence: Synthetic peptide
  Peptides from epitope mapping experiments
PLDHRDAGDAWFPGESE

SEQ ID NO: 366 - protein, 17 aa, Artificial Sequence
  Description of Artificial Sequence: Synthetic peptide
  Peptides from epitope mapping experiments
PLDHRDAGDLWAPGESE

SEQ ID NO: 367 - protein, 6 aa, Artificial Sequence
  Description of Artificial Sequence: Synthetic peptide
  Peptides from epitope mapping experiments
GDLWFP

SEQ ID NO: 368 - protein, 17 aa, Artificial Sequence
  Description of Artificial Sequence: Synthetic peptide
  CDRH2 Antibody ID 24G6 SST28 Variant
AISGSGGSTYYAESVKG

SEQ ID NO: 369 - protein, 7 aa, Artificial Sequence
  Description of Artificial Sequence: Synthetic peptide
  CDRL2 Antibody ID 6E7 SST29 Variant
AASSLQS

SEQ ID NO: 370 - protein, 9 aa, Artificial Sequence
  Description of Artificial Sequence: Synthetic peptide
  CDRL3 Antibody ID 6E7 SST29 Variant
QQADAFPRT

SEQ ID NO: 371 - protein, 17 aa, Artificial Sequence
  Description of Artificial Sequence: Synthetic peptide
  CDRH2 Antibody ID 6E7 SST29 Variant
IIYPGDADARYSPSFQG

SEQ ID NO: 372 - protein, 9 aa, Artificial Sequence
  Description of Artificial Sequence: Synthetic peptide
  CDRL3 Antibody ID 13E7 SST20 Variant
LQDNNFPPT

SEQ ID NO: 373 - protein, 17 aa, Artificial Sequence
  Description of Artificial Sequence: Synthetic peptide
  CDRH2 Antibody ID 13E7 SST20 Variant
IIYPGDADARYSPSFQG

SEQ ID NO: 374 - protein, 12 aa, Artificial Sequence
  Description of Artificial Sequence: Synthetic peptide
  CDRH3 Antibody ID 13E7 SST20 Variant
RRQGIFGDALDF

SEQ ID NO: 375 - protein, 12 aa, Artificial Sequence
  Description of Artificial Sequence: Synthetic peptide
  CDRH3 Antibody ID 5E3 SST29 Variant
DAGYLALYGTDV

SEQ ID NO: 376 - protein, 113 aa, Homo sapiens; identical to SEQ ID NO: 3

SEQ ID NO: 377 - protein, 9 aa, Artificial Sequence
  Description of Artificial Sequence: Synthetic peptide
  Synthetic Construct
FTFSSYAMS

SEQ ID NO: 378 - protein, 9 aa, Artificial Sequence
  Description of Artificial Sequence: Synthetic peptide
  Synthetic Construct
FTFSSSAMS

SEQ ID NO: 379 - protein, 9 aa, Artificial Sequence
  Description of Artificial Sequence: Synthetic peptide
  Synthetic Construct
GTFSSYAIS

SEQ ID NO: 380 - protein, 9 aa, Artificial Sequence
  Description of Artificial Sequence: Synthetic peptide
  Synthetic Construct
YTFTSYYIH

SEQ ID NO: 381 - protein, 9 aa, Artificial Sequence
  Description of Artificial Sequence: Synthetic peptide
  Synthetic Construct
YTFTSYYMH

SEQ ID NO: 382 - protein, 11 aa, Artificial Sequence
  Description of Artificial Sequence: Synthetic peptide
  Synthetic Construct
GSISSSSYYWG

SEQ ID NO: 383 - protein, 9 aa, Artificial Sequence
  Description of Artificial Sequence: Synthetic peptide
  Synthetic Construct
YSFTSYWIG

SEQ ID NO: 384 - protein, 9 aa, Artificial Sequence
  Description of Artificial Sequence: Synthetic peptide
  Synthetic Construct
YSFTSNWIG

SEQ ID NO: 385 - protein, 9 aa, Artificial Sequence
  Description of Artificial Sequence: Synthetic peptide
  Synthetic Construct
YSFTTYWIG

SEQ ID NO: 386 - protein, 9 aa, Artificial Sequence
  Description of Artificial Sequence: Synthetic peptide
  Synthetic Construct
YTFTSYGIS

SEQ ID NO: 387 - protein, 11 aa, Artificial Sequence
  Description of Artificial Sequence: Synthetic peptide
  Synthetic Construct
GSISSGGYYWS

SEQ ID NO: 388 - protein, 11 aa, Artificial Sequence
  Description of Artificial Sequence: Synthetic peptide
  Synthetic Construct
GSISSNSYYWG

SEQ ID NO: 389 - protein, 9 aa, Artificial Sequence
  Description of Artificial Sequence: Synthetic peptide
  Synthetic Construct
GSISSYYWS

SEQ ID NO: 390 - protein, 9 aa, Artificial Sequence
  Description of Artificial Sequence: Synthetic peptide
  Synthetic Construct
FTFSSYGMH

SEQ ID NO: 391 - protein, 9 aa, Artificial Sequence
  Description of Artificial Sequence: Synthetic peptide
  Synthetic Construct
FTFSTYGMH

SEQ ID NO: 392 - protein, 9 aa, Artificial Sequence
  Description of Artificial Sequence: Synthetic peptide
  Synthetic Construct
FTFSTYAMS

SEQ ID NO: 393 - protein, 9 aa, Artificial Sequence
  Description of Artificial Sequence: Synthetic peptide
  Synthetic Construct
YTFTGSYMH

SEQ ID NO: 394 - protein, 9 aa, Artificial Sequence
  Description of Artificial Sequence: Synthetic peptide
  Synthetic Construct
YTFTGYYMH

SEQ ID NO: 395 - protein, 9 aa, Artificial Sequence
  Description of Artificial Sequence: Synthetic peptide
  Synthetic Construct
YTFTNYGIS

SEQ ID NO: 396 - protein, 9 aa, Artificial Sequence
  Description of Artificial Sequence: Synthetic peptide
  Synthetic Construct
YTFTSYGIH

SEQ ID NO: 397 - protein, 9 aa, Artificial Sequence
  Description of Artificial Sequence: Synthetic peptide
  Synthetic Construct
FTFSSYSMN

SEQ ID NO: 398 - protein, 9 aa, Artificial Sequence
  Description of Artificial Sequence: Synthetic peptide
  Synthetic Construct
GSFSGYYWS

SEQ ID NO: 399 - protein, 17 aa, Artificial Sequence
  Description of Artificial Sequence: Synthetic peptide
  Synthetic Construct
VISGSGGSTYYADSVKG

SEQ ID NO: 400 - protein, 17 aa, Artificial Sequence
  Description of Artificial Sequence: Synthetic peptide
  Synthetic Construct
AISGSGGSTYYADSVKG

SEQ ID NO: 401 - protein, 17 aa, Artificial Sequence
  Description of Artificial Sequence: Synthetic peptide
  Synthetic Construct
GIIPIFGTANYAQKFQG

SEQ ID NO: 402 - protein, 17 aa, Artificial Sequence
  Description of Artificial Sequence: Synthetic peptide
  Synthetic Construct
GIIPIFGTASYAQKFQG

SEQ ID NO: 403 - protein, 17 aa, Artificial Sequence
  Description of Artificial Sequence: Synthetic peptide
  Synthetic Construct
IINPSGGSTSYAQKFQG

SEQ ID NO: 404 - protein, 17 aa, Artificial Sequence
  Description of Artificial Sequence: Synthetic peptide
  Synthetic Construct
IINPGGGSTSYAQKFQG

SEQ ID NO: 405 - protein, 17 aa, Artificial Sequence
  Description of Artificial Sequence: Synthetic peptide
  Synthetic Construct
IINPSGGSTTYAQKFQG

SEQ ID NO: 406 - protein, 16 aa, Artificial Sequence
  Description of Artificial Sequence: Synthetic peptide
  Synthetic Construct
SISYSGSTYYNPSLKS

SEQ ID NO: 407 - protein, 17 aa, Artificial Sequence
  Description of Artificial Sequence: Synthetic peptide
  Synthetic Construct
IIYPGDSDTTYSPSFQG

SEQ ID NO: 408 - protein, 17 aa, Artificial Sequence
  Description of Artificial Sequence: Synthetic peptide
  Synthetic Construct
IIYPGDSDTRYSPSFQG

SEQ ID NO: 409 - protein, 17 aa, Artificial Sequence
  Description of Artificial Sequence: Synthetic peptide
  Synthetic Construct
WISAYNGNTNYAQKLQG

SEQ ID NO: 410 - protein, 16 aa, Artificial Sequence
  Description of Artificial Sequence: Synthetic peptide
  Synthetic Construct
NIYYSGSTVYNPSLKS

SEQ ID NO: 411 - protein, 16 aa, Artificial Sequence
  Description of Artificial Sequence: Synthetic peptide
  Synthetic Construct
SIYYSGSTYYNPSLKS

SEQ ID NO: 412 - protein, 16 aa, Artificial Sequence
  Description of Artificial Sequence: Synthetic peptide
  Synthetic Construct
SIYYSGSTNYNPSLKS

SEQ ID NO: 413 - protein, 17 aa, Artificial Sequence
  Description of Artificial Sequence: Synthetic peptide
  Synthetic Construct
VISYDGSNKYYADSVKG

SEQ ID NO: 414 - protein, 17 aa, Artificial Sequence
  Description of Artificial Sequence: Synthetic peptide
  Synthetic Construct
LIWYDGSNKYYADSVKG

SEQ ID NO: 415 - protein, 17 aa, Artificial Sequence
  Description of Artificial Sequence: Synthetic peptide
  Synthetic Construct
VIWYDGSNKYYADSVKG

SEQ ID NO: 416 - protein, 17 aa, Artificial Sequence
  Description of Artificial Sequence: Synthetic peptide
  Synthetic Construct
WINPNSGGTNYAQKFQG

SEQ ID NO: 417 - protein, 17 aa, Artificial Sequence
  Description of Artificial Sequence: Synthetic peptide
  Synthetic Construct
SINPNSGGTNYAQKFQG

SEQ ID NO: 418 - protein, 17 aa, Artificial Sequence
  Description of Artificial Sequence: Synthetic peptide
  Synthetic Construct
WINPNSGGTSYAQKFQG

SEQ ID NO: 419 - protein, 17 aa, Artificial Sequence
  Description of Artificial Sequence: Synthetic peptide
  Synthetic Construct
WISTYNGNTNYAQKLQG

SEQ ID NO: 420 - protein, 17 aa, Artificial Sequence
  Description of Artificial Sequence: Synthetic peptide
  Synthetic Construct
SISSSSSYIYYADSVKG

SEQ ID NO: 421 - protein, 17 aa, Artificial Sequence
  Description of Artificial Sequence: Synthetic peptide
  Synthetic Construct
YISGSSSTIYYADSVKG

SEQ ID NO: 422 - protein, 16 aa, Artificial Sequence
  Description of Artificial Sequence: Synthetic peptide
  Synthetic Construct
YIYYSGSTVYNPSLKS

SEQ ID NO: 423 - protein, 16 aa, Artificial Sequence
  Description of Artificial Sequence: Synthetic peptide
  Synthetic Construct
EIDHSGSTKYNPSLKS

SEQ ID NO: 424 - protein, 11 aa, Artificial Sequence
  Description of Artificial Sequence: Synthetic peptide
  Synthetic Construct
AKGTPTLLFQH

SEQ ID NO: 425 - protein, 21 aa, Artificial Sequence
  Description of Artificial Sequence: Synthetic peptide
  Synthetic Construct
AKVPSYDYWSGYSNYYYYMDV

SEQ ID NO: 426 - protein, 11 aa, Artificial Sequence
  Description of Artificial Sequence: Synthetic peptide
  Synthetic Construct
AREQYHVGMDV

SEQ ID NO: 427 - protein, 10 aa, Artificial Sequence
  Description of Artificial Sequence: Synthetic peptide
  Synthetic Construct
ARGVDSIMDY

SEQ ID NO: 428 - protein, 13 aa, Artificial Sequence
  Description of Artificial Sequence: Synthetic peptide
  Synthetic Construct
ARAPQESPYVFDI

SEQ ID NO: 429 - protein, 13 aa, Artificial Sequence
  Description of Artificial Sequence: Synthetic peptide
  Synthetic Construct
ARGSPTYGYLYDP

SEQ ID NO: 430 - protein, 10 aa, Artificial Sequence
  Description of Artificial Sequence: Synthetic peptide
  Synthetic Construct
ARTSSKERDY

SEQ ID NO: 431 - protein, 13 aa, Artificial Sequence
  Description of Artificial Sequence: Synthetic peptide
  Synthetic Construct
ARGPYRLLLGMDV

SEQ ID NO: 432 - protein, 14 aa, Artificial Sequence
  Description of Artificial Sequence: Synthetic peptide
  Synthetic Construct
ARLHISGEVNWFDP

SEQ ID NO: 433 - protein, 15 aa, Artificial Sequence
  Description of Artificial Sequence: Synthetic peptide
  Synthetic Construct
AREAGYDYGELAFDI

SEQ ID NO: 434 - protein, 15 aa, Artificial Sequence
  Description of Artificial Sequence: Synthetic peptide
  Synthetic Construct
ARAGHYDGGHLGMDV

SEQ ID NO: 435 - protein, 17 aa, Artificial Sequence
  Description of Artificial Sequence: Synthetic peptide
  Synthetic Construct
ARLGHYSGTVSSYGMDV

SEQ ID NO: 436 - protein, 11 aa, Artificial Sequence
  Description of Artificial Sequence: Synthetic peptide
  Synthetic Construct
ARGPSHYYDLA

SEQ ID NO: 437 - protein, 12 aa, Artificial Sequence
  Description of Artificial Sequence: Synthetic peptide
  Synthetic Construct
ARGLYGYGVLDV

SEQ ID NO: 438 - protein, 12 aa, Artificial Sequence
  Description of Artificial Sequence: Synthetic peptide
  Synthetic Construct
ARGVLGYGVFDY

SEQ ID NO: 439 - protein, 16 aa, Artificial Sequence
  Description of Artificial Sequence: Synthetic peptide
  Synthetic Construct
ARDGGGEYPSGTPFDI

SEQ ID NO: 440 - protein, 11 aa, Artificial Sequence
  Description of Artificial Sequence: Synthetic peptide
  Synthetic Construct
ARSGMASFFDY

SEQ ID NO: 441 - protein, 10 aa, Artificial Sequence
  Description of Artificial Sequence: Synthetic peptide
  Synthetic Construct
AKLGGHSMDV

SEQ ID NO: 442 - protein, 11 aa, Artificial Sequence
  Description of Artificial Sequence: Synthetic peptide
  Synthetic Construct
AKPLKRGRGFY

SEQ ID NO: 443 - protein, 10 aa, Artificial Sequence
  Description of Artificial Sequence: Synthetic peptide
  Synthetic Construct
AKEGRTITMD

SEQ ID NO: 444 - protein, 10 aa, Artificial Sequence
  Description of Artificial Sequence: Synthetic peptide
  Synthetic Construct
AKDQYSVLDY

SEQ ID NO: 445 - protein, 13 aa, Artificial Sequence
  Description of Artificial Sequence: Synthetic peptide
  Synthetic Construct
AKKYSSRGVYFDY

SEQ ID NO: 446 - protein, 17 aa, Artificial Sequence
  Description of Artificial Sequence: Synthetic peptide
  Synthetic Construct
ARLGGAVGARHVTYFDY

SEQ ID NO: 447 - protein, 14 aa, Artificial Sequence
  Description of Artificial Sequence: Synthetic peptide
  Synthetic Construct
ARGQYYGGSGWFDP

SEQ ID NO: 448 - protein, 12 aa, Artificial Sequence
  Description of Artificial Sequence: Synthetic peptide
  Synthetic Construct
ARLGQEYAYFQH

SEQ ID NO: 449 - protein, 14 aa, Artificial Sequence
  Description of Artificial Sequence: Synthetic peptide
  Synthetic Construct
ARRRDGYYDEVFDI

SEQ ID NO: 450 - protein, 12 aa, Artificial Sequence
  Description of Artificial Sequence: Synthetic peptide
  Synthetic Construct
ARVPKHYVVLDY

SEQ ID NO: 451 - protein, 10 aa, Artificial Sequence
  Description of Artificial Sequence: Synthetic peptide
  Synthetic Construct
ARAGGHLFDY

SEQ ID NO: 452 - protein, 15 aa, Artificial Sequence
  Description of Artificial Sequence: Synthetic peptide
  Synthetic Construct
ARDRGGEYVDFAFDI

SEQ ID NO: 453 - protein, 15 aa, Artificial Sequence
  Description of Artificial Sequence: Synthetic peptide
  Synthetic Construct
ARTRSGYGASNYFDY

SEQ ID NO: 454 - protein, 15 aa, Artificial Sequence
  Description of Artificial Sequence: Synthetic peptide
  Synthetic Construct
ARGTGAAAASPAFDI

SEQ ID NO: 455 - protein, 12 aa, Artificial Sequence
  Description of Artificial Sequence: Synthetic peptide
  Synthetic Construct
ARVGQYMLGMDV

SEQ ID NO: 456 - protein, 18 aa, Artificial Sequence
  Description of Artificial Sequence: Synthetic peptide
  Synthetic Construct
ARGAPVDYGGIEPEYFQH

SEQ ID NO: 457 - protein, 12 aa, Artificial Sequence
  Description of Artificial Sequence: Synthetic peptide
  Synthetic Construct
AKHYHVGIAFDI

SEQ ID NO: 458 - protein, 13 aa, Artificial Sequence
  Description of Artificial Sequence: Synthetic peptide
  Synthetic Construct
ARAMARKSVAFDI

SEQ ID NO: 459 - protein, 14 aa, Artificial Sequence
  Description of Artificial Sequence: Synthetic peptide
  Synthetic Construct
AKVPSYQRGTAFDP

SEQ ID NO: 460 - protein, 14 aa, Artificial Sequence
  Description of Artificial Sequence: Synthetic peptide
  Synthetic Construct
AKSPAVAGIYRADY

SEQ ID NO: 461 - protein, 17 aa, Artificial Sequence
  Description of Artificial Sequence: Synthetic peptide
  Synthetic Construct
ARGPGYTTALDYYYMDV

SEQ ID NO: 462 - protein, 9 aa, Artificial Sequence
  Description of Artificial Sequence: Synthetic peptide
  Synthetic Construct
ARPAKTADY

SEQ ID NO: 463 - protein, 9 aa, Artificial Sequence
  Description of Artificial Sequence: Synthetic peptide
  Synthetic Construct
ARPGKSMDV

SEQ ID NO: 464 - protein, 14 aa, Artificial Sequence
  Description of Artificial Sequence: Synthetic peptide
  Synthetic Construct
ARGVGGQDYYYMDV

SEQ ID NO: 465 - protein, 13 aa, Artificial Sequence
  Description of Artificial Sequence: Synthetic peptide
  Synthetic Construct
ARGPLYHPMIFDY

SEQ ID NO: 466 - protein, 8 aa, Artificial Sequence
  Description of Artificial Sequence: Synthetic peptide
  Synthetic Construct
ARASSVDN

SEQ ID NO: 467 - protein, 19 aa, Artificial Sequence
  Description of Artificial Sequence: Synthetic peptide
  Synthetic Construct
ARGPTKAYYGSGSYVVFDP

SEQ ID NO: 468 - protein, 15 aa, Artificial Sequence
  Description of Artificial Sequence: Synthetic peptide
  Synthetic Construct
ARLGIYSTGATAFDI

SEQ ID NO: 469 - protein, 12 aa, Artificial Sequence
  Description of Artificial Sequence: Synthetic peptide
  Synthetic Construct
ARGGVWYSLFDI

SEQ ID NO: 470 - protein, 9 aa, Artificial Sequence
  Description of Artificial Sequence: Synthetic peptide
  Synthetic Construct
ARASKMGDD

SEQ ID NO: 471 - protein, 13 aa, Artificial Sequence
  Description of Artificial Sequence: Synthetic peptide
  Synthetic Construct
ARGGVPRVSYFQH

SEQ ID NO: 472 - protein, 16 aa, Artificial Sequence
  Description of Artificial Sequence: Synthetic peptide
  Synthetic Construct
ARAGHYDDWSGLGLDV

SEQ ID NO: 473 - protein, 13 aa, Artificial Sequence
  Description of Artificial Sequence: Synthetic peptide
  Synthetic Construct
ARGSGSGYDSWYD

SEQ ID NO: 474 - protein, 15 aa, Artificial Sequence
  Description of Artificial Sequence: Synthetic peptide
  Synthetic Construct
ARLGRWSSGSTAFDI

SEQ ID NO: 475 - protein, 15 aa, Artificial Sequence
  Description of Artificial Sequence: Synthetic peptide
  Synthetic Construct
ARLGRKPSGSVAFDI

SEQ ID NO: 476 - protein, 10 aa, Artificial Sequence
  Description of Artificial Sequence: Synthetic peptide
  Synthetic Construct
ARAGHKTHDY

SEQ ID NO: 477 - protein, 9 aa, Artificial Sequence
  Description of Artificial Sequence: Synthetic peptide
  Synthetic Construct
AKPGSMTDY

SEQ ID NO: 478 - protein, 10 aa, Artificial Sequence
  Description of Artificial Sequence: Synthetic peptide
  Synthetic Construct
ARAKSVDHDY

SEQ ID NO: 479 - protein, 15 aa, Artificial Sequence
  Description of Artificial Sequence: Synthetic peptide
  Synthetic Construct
ARDISTHDYDLAFDI

SEQ ID NO: 480 - protein, 11 aa, Artificial Sequence
  Description of Artificial Sequence: Synthetic peptide
  Synthetic Construct
ARSGTETLFDY

SEQ ID NO: 481 - protein, 14 aa, Artificial Sequence
  Description of Artificial Sequence: Synthetic peptide
  Synthetic Construct
ARAKMLDDGYAFDI

SEQ ID NO: 482 - protein, 14 aa, Artificial Sequence
  Description of Artificial Sequence: Synthetic peptide
  Synthetic Construct
ARDLGYSSLLALDI

SEQ ID NO: 483 - protein, 15 aa, Artificial Sequence
  Description of Artificial Sequence: Synthetic peptide
  Synthetic Construct
ARGGGRRGDNNWFDP

SEQ ID NO: 484 - protein, 10 aa, Artificial Sequence
  Description of Artificial Sequence: Synthetic peptide
  Synthetic Construct
ARGPPHEMDY

SEQ ID NO: 485 - protein, 12 aa, Artificial Sequence
  Description of Artificial Sequence: Synthetic peptide
  Synthetic Construct
ARTPYPWIYFDL

SEQ ID NO: 486 - protein, 13 aa, Artificial Sequence
  Description of Artificial Sequence: Synthetic peptide
  Synthetic Construct
ARGGRRHYGGMDV

SEQ ID NO: 487 - protein, 15 aa, Artificial Sequence
  Description of Artificial Sequence: Synthetic peptide
  Synthetic Construct
ARGGGTFWSGSWALY

SEQ ID NO: 488 - protein, 16 aa, Artificial Sequence
  Description of Artificial Sequence: Synthetic peptide
  Synthetic Construct
ARDSGNYDYWSGALRY

SEQ ID NO: 489 - protein, 10 aa, Artificial Sequence
  Description of Artificial Sequence: Synthetic peptide
  Synthetic Construct
ARVSSSWYKA

SEQ ID NO: 490 - protein, 17 aa, Artificial Sequence
  Description of Artificial Sequence: Synthetic peptide
  Synthetic Construct
ARVGVVVGRPGYSAFDI

SEQ ID NO: 491 - protein, 17 aa, Artificial Sequence
  Description of Artificial Sequence: Synthetic peptide
  Synthetic Construct
AKDLGGYYGGAAYGMDV

SEQ ID NO: 492 - protein, 15 aa, Artificial Sequence
  Description of Artificial Sequence: Synthetic peptide
  Synthetic Construct
AKDGVYYGLGNWFDP

SEQ ID NO: 493 - protein, 13 aa, Artificial Sequence
  Description of Artificial Sequence: Synthetic peptide
  Synthetic Construct
ARHGWDRVGWFDP

SEQ ID NO: 494 - protein, 11 aa, Artificial Sequence
  Description of Artificial Sequence: Synthetic peptide
  Synthetic Construct
RASQSVSSNLA

SEQ ID NO: 495 - protein, 11 aa, Artificial Sequence
  Description of Artificial Sequence: Synthetic peptide
  Synthetic Construct
RASQSVGSNLA

SEQ ID NO: 496 - protein, 11 aa, Artificial Sequence
  Description of Artificial Sequence: Synthetic peptide
  Synthetic Construct
QASQDISNYLN

SEQ ID NO: 497 - protein, 12 aa, Artificial Sequence
  Description of Artificial Sequence: Synthetic peptide
  Synthetic Construct
RASQSVSSSYLA

SEQ ID NO: 498 - protein, 11 aa, Artificial Sequence
  Description of Artificial Sequence: Synthetic peptide
  Synthetic Construct
RASQSVSSYLA

SEQ ID NO: 499 - protein, 11 aa, Artificial Sequence
  Description of Artificial Sequence: Synthetic peptide
  Synthetic Construct
RASQSISSYLN

SEQ ID NO: 500 - protein, 12 aa, Artificial Sequence
  Description of Artificial Sequence: Synthetic peptide
  Synthetic Construct
RASQSVSSDYLA

SEQ ID NO: 501 - protein, 17 aa, Artificial Sequence
  Description of Artificial Sequence: Synthetic peptide
  Synthetic Construct
KSSQSVLYSSNNKNYLA

SEQ ID NO: 502 - protein, 11 aa, Artificial Sequence
  Description of Artificial Sequence: Synthetic peptide
  Synthetic Construct
QASQDISNFLN

SEQ ID NO: 503 - protein, 11 aa, Artificial Sequence
  Description of Artificial Sequence: Synthetic peptide
  Synthetic Construct
RASQSISRYLN

SEQ ID NO: 504 - protein, 11 aa, Artificial Sequence
  Description of Artificial Sequence: Synthetic peptide
  Synthetic Construct
RASQSINSYLN

SEQ ID NO: 505 - protein, 11 aa, Artificial Sequence
  Description of Artificial Sequence: Synthetic peptide
  Synthetic Construct
RASQSISSWLA

SEQ ID NO: 506 - protein, 11 aa, Artificial Sequence
  Description of Artificial Sequence: Synthetic peptide
  Synthetic Construct
RASQGIDSWLA

SEQ ID NO: 507 - protein, 11 aa, Artificial Sequence
  Description of Artificial Sequence: Synthetic peptide
  Synthetic Construct
QASQDITNYLN

SEQ ID NO: 508 - protein, 16 aa, Artificial Sequence
  Description of Artificial Sequence: Synthetic peptide
  Synthetic Construct
RSSQSLLHSNGYNYLD

SEQ ID NO: 509 - protein, 11 aa, Artificial Sequence
  Description of Artificial Sequence: Synthetic peptide
  Synthetic Construct
RASQGISSWLA

SEQ ID NO: 510 - protein, 11 aa, Artificial Sequence
  Description of Artificial Sequence: Synthetic peptide
  Synthetic Construct
RASQDISSWLA

SEQ ID NO: 511 - protein, 11 aa, Artificial Sequence
  Description of Artificial Sequence: Synthetic peptide
  Synthetic Construct
RASQSVSRYLA

SEQ ID NO: 512 - protein, 7 aa, Artificial Sequence
  Description of Artificial Sequence: Synthetic peptide
  Synthetic Construct
GASTRAT

SEQ ID NO: 513 - protein, 7 aa, Artificial Sequence
  Description of Artificial Sequence: Synthetic peptide
  Synthetic Construct
DASNLAT

SEQ ID NO: 514 - protein, 7 aa, Artificial Sequence
  Description of Artificial Sequence: Synthetic peptide
  Synthetic Construct
SASTRAT

SEQ ID NO: 515 - protein, 7 aa, Artificial Sequence
  Description of Artificial Sequence: Synthetic peptide
  Synthetic Construct
GASSRAT

SEQ ID NO: 516 - protein, 7 aa, Artificial Sequence
  Description of Artificial Sequence: Synthetic peptide
  Synthetic Construct
DASKRAT

SEQ ID NO: 517 - protein, 7 aa, Artificial Sequence
  Description of Artificial Sequence: Synthetic peptide
  Synthetic Construct
GASSLQS

SEQ ID NO: 518 - protein, 7 aa, Artificial Sequence
  Description of Artificial Sequence: Synthetic peptide
  Synthetic Construct
DASNRAT

SEQ ID NO: 519 - protein, 7 aa, Artificial Sequence
  Description of Artificial Sequence: Synthetic peptide
  Synthetic Construct
AASSLQS

SEQ ID NO: 520 - protein, 7 aa, Artificial Sequence
  Description of Artificial Sequence: Synthetic peptide
  Synthetic Construct
DASNLET

SEQ ID NO: 521 - protein, 7 aa, Artificial Sequence
  Description of Artificial Sequence: Synthetic peptide
  Synthetic Construct
WASTRES

SEQ ID NO: 522 - protein, 7 aa, Artificial Sequence
  Description of Artificial Sequence: Synthetic peptide
  Synthetic Construct
DSSNRAT

SEQ ID NO: 523 - protein, 7 aa, Artificial Sequence
  Description of Artificial Sequence: Synthetic peptide
  Synthetic Construct
DASSLES

SEQ ID NO: 524 - protein, 7 aa, Artificial Sequence
  Description of Artificial Sequence: Synthetic peptide
  Synthetic Construct
GASNRAT

SEQ ID NO: 525 - protein, 7 aa, Artificial Sequence
  Description of Artificial Sequence: Synthetic peptide
  Synthetic Construct
LGSHRAS

SEQ ID NO: 526 - protein, 7 aa, Artificial Sequence
  Description of Artificial Sequence: Synthetic peptide
  Synthetic Construct
KASSLES

SEQ ID NO: 527 - protein, 9 aa, Artificial Sequence
  Description of Artificial Sequence: Synthetic peptide
  Synthetic Construct
QQLPYWPPT

SEQ ID NO: 528 - protein, 9 aa, Artificial Sequence
  Description of Artificial Sequence: Synthetic peptide
  Synthetic Construct
QQYFFYPPT

SEQ ID NO: 529 - protein, 9 aa, Artificial Sequence
  Description of Artificial Sequence: Synthetic peptide
  Synthetic Construct
QQPFNFPYT

SEQ ID NO: 530 - protein, 9 aa, Artificial Sequence
  Description of Artificial Sequence: Synthetic peptide
  Synthetic Construct
QQDHDYPFT

SEQ ID NO: 531 - protein, 9 aa, Artificial Sequence
  Description of Artificial Sequence: Synthetic peptide
  Synthetic Construct
QQYFSSPFT

SEQ ID NO: 532 - protein, 9 aa, Artificial Sequence
  Description of Artificial Sequence: Synthetic peptide
  Synthetic Construct
QQRVNLPPT

SEQ ID NO: 533 - protein, 9 aa, Artificial Sequence
  Description of Artificial Sequence: Synthetic peptide
  Synthetic Construct
QQRISYPIT

SEQ ID NO: 534 - protein, 9 aa, Artificial Sequence
  Description of Artificial Sequence: Synthetic peptide
  Synthetic Construct
QQIDDTPIT

SEQ ID NO: 535 - protein, 9 aa, Artificial Sequence
  Description of Artificial Sequence: Synthetic peptide
  Synthetic Construct
QQFSYWPWT

SEQ ID NO: 536 - protein, 9 aa, Artificial Sequence
  Description of Artificial Sequence: Synthetic peptide
  Synthetic Construct
QQHDSSPPT

SEQ ID NO: 537 - protein, 9 aa, Artificial Sequence
  Description of Artificial Sequence: Synthetic peptide
  Synthetic Construct
QQDYSYPWT

SEQ ID NO: 538 - protein, 9 aa, Artificial Sequence
  Description of Artificial Sequence: Synthetic peptide
  Synthetic Construct
QQEYAVPYT

SEQ ID NO: 539 - protein, 9 aa, Artificial Sequence
  Description of Artificial Sequence: Synthetic peptide
  Synthetic Construct
QQVSNYPIT

SEQ ID NO: 540 - protein, 9 aa, Artificial Sequence
  Description of Artificial Sequence: Synthetic peptide
  Synthetic Construct
QQVDNIPPT

SEQ ID NO: 541 - protein, 8 aa, Artificial Sequence
  Description of Artificial Sequence: Synthetic peptide
  Synthetic Construct
QQFDTYPT

SEQ ID NO: 542 - protein, 8 aa, Artificial Sequence
  Description of Artificial Sequence: Synthetic peptide
  Synthetic Construct
QQFLNFPT

SEQ ID NO: 543 - protein, 8 aa, Artificial Sequence
  Description of Artificial Sequence: Synthetic peptide
  Synthetic Construct
QQFFNFPT

SEQ ID NO: 544 - protein, 9 aa, Artificial Sequence
  Description of Artificial Sequence: Synthetic peptide
  Synthetic Construct
QQFIDLPFT

SEQ ID NO: 545 - protein, 9 aa, Artificial Sequence
  Description of Artificial Sequence: Synthetic peptide
  Synthetic Construct
QQYYDLPFT

SEQ ID NO: 546 - protein, 9 aa, Artificial Sequence
  Description of Artificial Sequence: Synthetic peptide
  Synthetic Construct
QQFSSHPFT

SEQ ID NO: 547 - protein, 9 aa, Artificial Sequence
  Description of Artificial Sequence: Synthetic peptide
  Synthetic Construct
QQDDRSPYT

SEQ ID NO: 548 - protein, 9 aa, Artificial Sequence
  Description of Artificial Sequence: Synthetic peptide
  Synthetic Construct
QQAYLPPIT

SEQ ID NO: 549 - protein, 10 aa, Artificial Sequence
  Description of Artificial Sequence: Synthetic peptide
  Synthetic Construct
QQAFSPPPWT

SEQ ID NO: 550 - protein, 8 aa, Artificial Sequence
  Description of Artificial Sequence: Synthetic peptide
  Synthetic Construct
QQDDRSPT

SEQ ID NO: 551 - protein, 9 aa, Artificial Sequence
  Description of Artificial Sequence: Synthetic peptide
  Synthetic Construct
QQEFDLPFT

SEQ ID NO: 552 - protein, 9 aa, Artificial Sequence
  Description of Artificial Sequence: Synthetic peptide
  Synthetic Construct
QQYNNFPPT

SEQ ID NO: 553 - protein, 9 aa, Artificial Sequence
  Description of Artificial Sequence: Synthetic peptide
  Synthetic Construct
QQRYLRPIT

SEQ ID NO: 554 - protein, 8 aa, Artificial Sequence
  Description of Artificial Sequence: Synthetic peptide
  Synthetic Construct
QQPGAVPT

SEQ ID NO: 555 - protein, 9 aa, Artificial Sequence
  Description of Artificial Sequence: Synthetic peptide
  Synthetic Construct
QQVYITPIT

SEQ ID NO: 556 - protein, 9 aa, Artificial Sequence
  Description of Artificial Sequence: Synthetic peptide
  Synthetic Construct
QQPVDLPFT

SEQ ID NO: 557 - protein, 9 aa, Artificial Sequence
  Description of Artificial Sequence: Synthetic peptide
  Synthetic Construct
QQYSFFPPT

SEQ ID NO: 558 - protein, 9 aa, Artificial Sequence
  Description of Artificial Sequence: Synthetic peptide
  Synthetic Construct
QQDSSFPPT

SEQ ID NO: 559 - protein, 9 aa, Artificial Sequence
  Description of Artificial Sequence: Synthetic peptide
  Synthetic Construct
QQSDFPPWT

SEQ ID NO: 560 - protein, 9 aa, Artificial Sequence
  Description of Artificial Sequence: Synthetic peptide
  Synthetic Construct
QQGYSAPIT

SEQ ID NO: 561 - protein, 8 aa, Artificial Sequence
  Description of Artificial Sequence: Synthetic peptide
  Synthetic Construct
QQLFDWPT

SEQ ID NO: 562 - protein, 8 aa, Artificial Sequence
  Description of Artificial Sequence: Synthetic peptide
  Synthetic Construct
QQRAFLFT

SEQ ID NO: 563 - protein, 9 aa, Artificial Sequence
  Description of Artificial Sequence: Synthetic peptide
  Synthetic Construct
QQIDFLPYT

SEQ ID NO: 564 - protein, 9 aa, Artificial Sequence
  Description of Artificial Sequence: Synthetic peptide
  Synthetic Construct
QQVYSPPIT

SEQ ID NO: 565 - protein, 9 aa, Artificial Sequence
  Description of Artificial Sequence: Synthetic peptide
  Synthetic Construct
QQGYAAPIT

SEQ ID NO: 566 - protein, 9 aa, Artificial Sequence
  Description of Artificial Sequence: Synthetic peptide
  Synthetic Construct
QQRYALPIT

SEQ ID NO: 567 - protein, 9 aa, Artificial Sequence
  Description of Artificial Sequence: Synthetic peptide
  Synthetic Construct
QQYASPPIT

SEQ ID NO: 568 - protein, 9 aa, Artificial Sequence
  Description of Artificial Sequence: Synthetic peptide
  Synthetic Construct
QQVYSTPIT

SEQ ID NO: 569 - protein, 8 aa, Artificial Sequence
  Description of Artificial Sequence: Synthetic peptide
  Synthetic Construct
QQLVHWPT

SEQ ID NO: 570 - protein, 8 aa, Artificial Sequence
  Description of Artificial Sequence: Synthetic peptide
  Synthetic Construct
QQLDDWFT

SEQ ID NO: 571 - protein, 9 aa, Artificial Sequence
  Description of Artificial Sequence: Synthetic peptide
  Synthetic Construct
QQRSNYPIT

SEQ ID NO: 572 - protein, 9 aa, Artificial Sequence
  Description of Artificial Sequence: Synthetic peptide
  Synthetic Construct
QQRILYPIT

SEQ ID NO: 573 - protein, 9 aa, Artificial Sequence
  Description of Artificial Sequence: Synthetic peptide
  Synthetic Construct
QQRAAYPIT

SEQ ID NO: 574 - protein, 9 aa, Artificial Sequence
  Description of Artificial Sequence: Synthetic peptide
  Synthetic Construct
QQRTSHPIT

SEQ ID NO: 575 - protein, 9 aa, Artificial Sequence
  Description of Artificial Sequence: Synthetic peptide
  Synthetic Construct
QQYAGSPFT

SEQ ID NO: 576 - protein, 8 aa, Artificial Sequence
  Description of Artificial Sequence: Synthetic peptide
  Synthetic Construct
QQFDDVFT

SEQ ID NO: 577 - protein, 9 aa, Artificial Sequence
  Description of Artificial Sequence: Synthetic peptide
  Synthetic Construct
QQYVNSPFT

SEQ ID NO: 578 - protein, 9 aa, Artificial Sequence
  Description of Artificial Sequence: Synthetic peptide
  Synthetic Construct
QQSDDDPFT

SEQ ID NO: 579 - protein, 9 aa, Artificial Sequence
  Description of Artificial Sequence: Synthetic peptide
  Synthetic Construct
QQLSTYPLT

SEQ ID NO: 580 - protein, 9 aa, Artificial Sequence
  Description of Artificial Sequence: Synthetic peptide
  Synthetic Construct
QQRSVYPIT

SEQ ID NO: 581 - protein, 9 aa, Artificial Sequence
  Description of Artificial Sequence: Synthetic peptide
  Synthetic Construct
QQVSLFPLT

SEQ ID NO: 582 - protein, 10 aa, Artificial Sequence
  Description of Artificial Sequence: Synthetic peptide
  Synthetic Construct
LDYNSYSPIT

SEQ ID NO: 583 - protein, 9 aa, Artificial Sequence
  Description of Artificial Sequence: Synthetic peptide
  Synthetic Construct
QQHIALPFT

SEQ ID NO: 584 - protein, 9 aa, Artificial Sequence
  Description of Artificial Sequence: Synthetic peptide
  Synthetic Construct
QQRASMPIT

SEQ ID NO: 585 - protein, 9 aa, Artificial Sequence
  Description of Artificial Sequence: Synthetic peptide
  Synthetic Construct
QQAFNRPPT

SEQ ID NO: 586 - protein, 9 aa, Artificial Sequence
  Description of Artificial Sequence: Synthetic peptide
  Synthetic Construct
QQSSVHPYT

SEQ ID NO: 587 - protein, 9 aa, Artificial Sequence
  Description of Artificial Sequence: Synthetic peptide
  Synthetic Construct
QQAYSLPPT

SEQ ID NO: 588 - protein, 8 aa, Artificial Sequence
  Description of Artificial Sequence: Synthetic peptide
  Synthetic Construct
QQDDDGYT

SEQ ID NO: 589 - protein, 9 aa, Artificial Sequence
  Description of Artificial Sequence: Synthetic peptide
  Synthetic Construct
QQDYSWPYT

SEQ ID NO: 590 - protein, 9 aa, Artificial Sequence
  Description of Artificial Sequence: Synthetic peptide
  Synthetic Construct
QQRSAYPIT

SEQ ID NO: 591 - protein, 9 aa, Artificial Sequence
  Description of Artificial Sequence: Synthetic peptide
  Synthetic Construct
QQRSHFPIT

SEQ ID NO: 592 - protein, 9 aa, Artificial Sequence
  Description of Artificial Sequence: Synthetic peptide
  Synthetic Construct
QQRANYPIT

SEQ ID NO: 593 - protein, 9 aa, Artificial Sequence
  Description of Artificial Sequence: Synthetic peptide
  Synthetic Construct
QQRADYPIT

SEQ ID NO: 594 - protein, 9 aa, Artificial Sequence
  Description of Artificial Sequence: Synthetic peptide
  Synthetic Construct
QQAGSHPFT

SEQ ID NO: 595 - protein, 9 aa, Artificial Sequence
  Description of Artificial Sequence: Synthetic peptide
  Synthetic Construct
QQDVNYPPT

SEQ ID NO: 596 - protein, 9 aa, Artificial Sequence
  Description of Artificial Sequence: Synthetic peptide
  Synthetic Construct
QQDDNYPYT

SEQ ID NO: 597 - protein, 9 aa, Artificial Sequence
  Description of Artificial Sequence: Synthetic peptide
  Synthetic Construct
QQRSTFPIT

SEQ ID NO: 598 - protein, 9 aa, Artificial Sequence
  Description of Artificial Sequence: Synthetic peptide
  Synthetic Construct
QQVSNYPFT

SEQ ID NO: 599 - protein, 9 aa, Artificial Sequence
  Description of Artificial Sequence: Synthetic peptide
  Synthetic Construct
QQYHDAPIT

SEQ ID NO: 600 - protein, 9 aa, Artificial Sequence
  Description of Artificial Sequence: Synthetic peptide
  Synthetic Construct
QQAYVVPPT

SEQ ID NO: 601 - protein, 9 aa, Artificial Sequence
  Description of Artificial Sequence: Synthetic peptide
  Synthetic Construct
QQADNWPFT

SEQ ID NO: 602 - protein, 9 aa, Artificial Sequence
  Description of Artificial Sequence: Synthetic peptide
  Synthetic Construct
MQALESPRT

SEQ ID NO: 603 - protein, 9 aa, Artificial Sequence
  Description of Artificial Sequence: Synthetic peptide
  Synthetic Construct
QQYVNWPFT

SEQ ID NO: 604 - protein, 9 aa, Artificial Sequence
  Description of Artificial Sequence: Synthetic peptide
  Synthetic Construct
QQSSNWPWT

SEQ ID NO: 605 - protein, 9 aa, Artificial Sequence
  Description of Artificial Sequence: Synthetic peptide
  Synthetic Construct
QQASTFPIT

SEQ ID NO: 606 - protein, 9 aa, Artificial Sequence
  Description of Artificial Sequence: Synthetic peptide
  Synthetic Construct
QQRNSLPLT

SEQ ID NO: 607 - protein, 9 aa, Artificial Sequence
  Description of Artificial Sequence: Synthetic peptide
  Synthetic Construct
QQSYDFPIT

SEQ ID NO: 608 - protein, 10 aa, Artificial Sequence
  Description of Artificial Sequence: Synthetic peptide
  Synthetic Construct
QQEVDYPPLT

SEQ ID NO: 609 - protein, 9 aa, Artificial Sequence
  Description of Artificial Sequence: Synthetic peptide
  Synthetic Construct
QQLNSYSPT

SEQ ID NO: 610 - protein, 9 aa, Artificial Sequence
  Description of Artificial Sequence: Synthetic peptide
  Synthetic Construct
QQYIFWPPT

SEQ ID NO: 611 - protein, 8 aa, Artificial Sequence
  Description of Artificial Sequence: Synthetic peptide
  Synthetic Construct
GDLWFPGE

SEQ ID NO: 612 - protein, 14 aa, Artificial Sequence
  Description of Artificial Sequence: Synthetic peptide
  Synthetic Construct
DLWFPGESESFEDA

SEQ ID NO: 613 - protein, 14 aa, Artificial Sequence
  Description of Artificial Sequence: Synthetic peptide
  Synthetic Construct
DLWVPEESSSFEGA

SEQ ID NO: 614 - protein, 15 aa, Artificial Sequence
  Description of Artificial Sequence: Synthetic peptide
  Synthetic Construct
ADPLDHRDAGDLWFP

SEQ ID NO: 615 - protein, 13 aa, Artificial Sequence
  Description of Artificial Sequence: Synthetic peptide
  Synthetic Construct
SISRSLLEGEIPF

SEQ ID NO: 616 - protein, 118 aa, Artificial Sequence
  Description of Artificial Sequence: Synthetic polypeptide
  Synthetic Construct
EVQLLESGGGLVQPGGSLRLSCAASGFTFSSYAMSWVRQAPGKGLEWVSVISGSGGSTYYADSVKGRFTISRDNSKNTLYLQMNSLRAEDTAVYYCAKGTPTLLFQHWGQGTLVTVSS

SEQ ID NO: 617 - protein, 107 aa, Artificial Sequence
  Description of Artificial Sequence: Synthetic polypeptide
  Synthetic Construct
EIVMTQSPATLSVSPGERATLSCRASQSVSSNLAWYQQKPGQAPRLLIYGASTRATGIPARFSGSGSGTEFTLTISSLQSEDFAVYYCQQLPYWPPTFGGGTKVEIK

SEQ ID NO: 618 - protein, 128 aa, Artificial Sequence
  Description of Artificial Sequence: Synthetic polypeptide
  Synthetic Construct
EVQLLESGGGLVQPGGSLRLSCAASGFTFSSSAMSWVRQAPGKGLEWVSAISGSGGSTYYADSVKGRFTISRDNSKNTLYLQMNSLRAEDTAVYYCAKVPSYDYWSGYSNYYYYMDVWGKGTTVTVSS

SEQ ID NO: 619 - protein, 107 aa, Artificial Sequence
  Description of Artificial Sequence: Synthetic polypeptide
  Synthetic Construct
EIVLTQSPATLSVSPGERATLSCRASQSVGSNLAWYQQKPGQAPRLLIYGASTRATGIPARFSGSGSGTEFTLTISSLQSEDFAVYYCQQYFFYPPTFGGGTKVEIK

SEQ ID NO: 620 - protein, 118 aa, Artificial Sequence
  Description of Artificial Sequence: Synthetic polypeptide
  Synthetic Construct
QVQLVQSGAEVKKPGSSVKVSCKASGGTFSSYAISWVRQAPGQGLEWMGGIIPIFGTANYAQKFQGRVTITADESTSTAYMELSSLRSEDTAVYYCAREQYHVGMDVWGKGTTVTVSS

SEQ ID NO: 621 - protein, 107 aa, Artificial Sequence
  Description of Artificial Sequence: Synthetic polypeptide
  Synthetic Construct
DIQMTQSPSSLSASVGDRVTITCQASQDISNYLNWYQQKPGKAPKLLIYDASNLATGVPSRFSGSGSGTDFTFTISSLQPEDIATYYCQQPFNFPYTFGGGTKVEIK

SEQ ID NO: 622 - protein, 117 aa, Artificial Sequence
  Description of Artificial Sequence: Synthetic polypeptide
  Synthetic Construct
QVQLVQSGAEVKKPGSSVKVSCKASGGTFSSYAISWVRQAPGQGLEWMGGIIPIFGTASYAQKFQGRVTITADESTSTAYMELSSLRSEDTAVYYCARGVDSIMDYWGQGTLVTVSS

SEQ ID NO: 623 - protein, 107 aa, Artificial Sequence
  Description of Artificial Sequence: Synthetic polypeptide
  Synthetic Construct
EIVMTQSPATLSVSPGERATLSCRASQSVSSNLAWYQQKPGQAPRLLIYSASTRATGIPARFSGSGSGTEFTLTISSLQSEDFAVYYCQQDHDYPFTFGGGTKVEIK

SEQ ID NO: 624 - protein, 120 aa, Artificial Sequence
  Description of Artificial Sequence: Synthetic polypeptide
  Synthetic Construct
QVQLVQSGAEVKKPGASVKVSCKASGYTFTSYYIHWVRQAPGQGLEWMGIINPSGGSTSYAQKFQGRVTMTRDTSTSTVYMELSSLRSEDTAVYYCARAPQESPYVFDIWGQGTMVTVSS

SEQ ID NO: 625 - protein, 108 aa, Artificial Sequence
  Description of Artificial Sequence: Synthetic polypeptide
  Synthetic Construct
EIVMTQSPGTLSLSPGERATLSCRASQSVSSSYLAWYQQKPGQAPRLLIYGASSRATGIPDRFSGSGSGTDFTLTISRLEPEDFAVYYCQQYFSSPFTFGGGTKVEIK

SEQ ID NO: 626 - protein, 120 aa, Artificial Sequence
  Description of Artificial Sequence: Synthetic polypeptide
  Synthetic Construct
QVQLVQSGAEVKKPGASVKVSCKASGYTFTSYYMHWVRQAPGQGLEWMGIINPGGGSTSYAQKFQGRVTMTRDTSTSTVYMELSSLRSEDTAVYYCARGSPTYGYLYDPWGQGTLVTVSS

SEQ ID NO: 627 - protein, 107 aa, Artificial Sequence
  Description of Artificial Sequence: Synthetic polypeptide
  Synthetic Construct
EIVLTQSPATLSLSPGERATLSCRASQSVSSYLAWYQQKPGQAPRLLIYDASKRATGIPARFSGSGSGTDFTLTISSLEPEDFAVYYCQQRVNLPPTFGGGTKVEIK

SEQ ID NO: 628 - protein, 117 aa, Artificial Sequence
  Description of Artificial Sequence: Synthetic polypeptide
  Synthetic Construct
QVQLVQSGAEVKKPGASVKVSCKASGYTFTSYYMHWVRQAPGQGLEWMGIINPSGGSTTYAQKFQGRVTMTRDTSTSTVYMELSSLRSEDTAVYYCARTSSKERDYWGQGTLVTVSS

SEQ ID NO: 629 - protein, 107 aa, Artificial Sequence
  Description of Artificial Sequence: Synthetic polypeptide
  Synthetic Construct
EIVLTQSPATLSLSPGERATLSCRASQSVSSYLAWYQQKPGQAPRLLIYDASKRATGIPARFSGSGSGTDFTLTISSLEPEDFAVYYCQQRISYPITFGGGTKVEIK

SEQ ID NO: 630 - protein, 121 aa, Artificial Sequence
  Description of Artificial Sequence: Synthetic polypeptide
  Synthetic Construct
QLQLQESGPGLVKPSETLSLTCTVSGGSISSSSYYWGWIRQPPGKGLEWIGSISYSGSTYYNPSLKSRVTISVDTSKNQFSLKLSSVTAADTAVYYCARGPYRLLLGMDVWGQGTTVTVSS

SEQ ID NO: 631 - protein, 107 aa, Artificial Sequence
  Description of Artificial Sequence: Synthetic polypeptide
  Synthetic Construct
DIQMTQSPSSLSASVGDRVTITCRASQSISSYLNWYQQKPGKAPKLLIYGASSLQSGVPSRFSGSGSGTDFTLTISSLQPEDFATYYCQQIDDTPITFGGGTKVEIK

SEQ ID NO: 632 - protein, 121 aa, Artificial Sequence
  Description of Artificial Sequence: Synthetic polypeptide
  Synthetic Construct
EVQLVQSGAEVKKPGESLKISCKGSGYSFTSYWIGWVRQMPGKGLEWMGIIYPGDSDTTYSPSFQGQVTISADKSISTAYLQWSSLKASDTAMYYCARLHISGEVNWFDPWGQGTLVTVSS

SEQ ID NO: 633 - protein, 107 aa, Artificial Sequence
  Description of Artificial Sequence: Synthetic polypeptide
  Synthetic Construct
EIVLTQSPATLSLSPGERATLSCRASQSVSSYLAWYQQKPGQAPRLLIYDASNRATGIPARFSGSGSGTDFTLTISSLEPEDFAVYYCQQFSYWPWTFGGGTKVEIK

SEQ ID NO: 634 - protein, 122 aa, Artificial Sequence
  Description of Artificial Sequence: Synthetic polypeptide
  Synthetic Construct
EVQLVQSGAEVKKPGESLKISCKGSGYSFTSNWIGWVRQMPGKGLEWMGIIYPGDSDTRYSPSFQGQVTISADKSISTAYLQWSSLKASDTAMYYCAREAGYDYGELAFDIWGQGTMVTVSS

SEQ ID NO: 635 - protein, 108 aa, Artificial Sequence
  Description of Artificial Sequence: Synthetic polypeptide
  Synthetic Construct
EIVLTQSPGTLSLSPGERATLSCRASQSVSSSYLAWYQQKPGQAPRLLIYGASSRATGIPDRFSGSGSGTDFTLTISRLEPEDFAVYYCQQHDSSPPTFGGGTKVEIK

SEQ ID NO: 636 - protein, 122 aa, Artificial Sequence
  Description of Artificial Sequence: Synthetic polypeptide
  Synthetic Construct
EVQLVQSGAEVKKPGESLKISCKGSGYSFTTYWIGWVRQMPGKGLEWMGIIYPGDSDTRYSPSFQGQVTISADKSISTAYLQWSSLKASDTAMYYCARAGHYDGGHLGMDVWGQGTTVTVSS

SEQ ID NO: 637 - protein, 108 aa, Artificial Sequence
  Description of Artificial Sequence: Synthetic polypeptide
  Synthetic Construct
EIVLTQSPGTLSLSPGERATLSCRASQSVSSDYLAWYQQKPGQAPRLLIYGASSRATGIPDRFSGSGSGTDFTLTISRLEPEDFAVYYCQQDYSYPWTFGGGTKVEIK

SEQ ID NO: 638 - protein, 124 aa, Artificial Sequence
  Description of Artificial Sequence: Synthetic polypeptide
  Synthetic Construct
EVQLVQSGAEVKKPGESLKISCKGSGYSFTSYWIGWVRQMPGKGLEWMGIIYPGDSDTRYSPSFQGQVTISADKSISTAYLQWSSLKASDTAMYYCARLGHYSGTVSSYGMDVWGQGTTVTVSS

SEQ ID NO: 639 - protein, 107 aa, Artificial Sequence
  Description of Artificial Sequence: Synthetic polypeptide
  Synthetic Construct
DIQMTQSPSSLSASVGDRVTITCRASQSISSYLNWYQQKPGKAPKLLIYAASSLQSGVPSRFSGSGSGTDFTLTISSLQPEDFATYYCQQEYAVPYTFGGGTKVEIK

SEQ ID NO: 640 - protein, 118 aa, Artificial Sequence
  Description of Artificial Sequence: Synthetic polypeptide
  Synthetic Construct
QVQLVQSGAEVKKPGASVKVSCKASGYTFTSYGISWVRQAPGQGLEWMGWISAYNGNTNYAQKLQGRVTMTTDTSTSTAYMELRSLRSDDTAVYYCARGPSHYYDLAWGQGTLVTVSS

SEQ ID NO: 641 - protein, 107 aa, Artificial Sequence
  Description of Artificial Sequence: Synthetic polypeptide
  Synthetic Construct
EIVLTQSPATLSLSPGERATLSCRASQSVSSYLAWYQQKPGQAPRLLIYDASNRATGIPARFSGSGSGTDFTLTISSLEPEDFAVYYCQQVSNYPITFGGGTKVEIK

SEQ ID NO: 642 - protein, 120 aa, Artificial Sequence
  Description of Artificial Sequence: Synthetic polypeptide
  Synthetic Construct
QVQLQESGPGLVKPSQTLSLTCTVSGGSISSGGYYWSWIRQHPGKGLEWIGNIYYSGSTVYNPSLKSRVTISVDTSKNQFSLKLSSVTAADTAVYYCARGLYGYGVLDVWGQGTMVTVSS

SEQ ID NO: 643 - protein, 107 aa, Artificial Sequence
  Description of Artificial Sequence: Synthetic polypeptide
  Synthetic Construct
DIQMTQSPSSLSASVGDRVTITCQASQDISNYLNWYQQKPGKAPKLLIYDASNLETGVPSRFSGSGSGTDFTFTISSLQPEDIATYYCQQVDNIPPTFGGGTKVEIK

SEQ ID NO: 644 - protein, 106 aa, Artificial Sequence
  Description of Artificial Sequence: Synthetic polypeptide
  Synthetic Construct
DIQMTQSPSSLSASVGDRVTITCQASQDISNYLNWYQQKPGKAPKLLIYDASNLETGVPSRFSGSGSGTDFTFTISSLQPEDIATYYCQQFDTYPTFGGGTKVEIK

SEQ ID NO: 645 - protein, 120 aa, Artificial Sequence
  Description of Artificial Sequence: Synthetic polypeptide
  Synthetic Construct
QLQLQESGPGLVKPSETLSLTCTVSGGSISSNSYYWGWIRQPPGKGLEWIGSIYYSGSTYYNPSLKSRVTISVDTSKNQFSLKLSSVTAADTAVYYCARGVLGYGVFDYWGQGTLVTVSS

SEQ ID NO: 646 - protein, 106 aa, Artificial Sequence
  Description of Artificial Sequence: Synthetic polypeptide
  Synthetic Construct
DIQMTQSPSSLSASVGDRVTITCQASQDISNYLNWYQQKPGKAPKLLIYDASNLETGVPSRFSGSGSGTDFTFTISSLQPEDIATYYCQQFLNFPTFGGGTKVEIK

SEQ ID NO: 647 - protein, 106 aa, Artificial Sequence
  Description of Artificial Sequence: Synthetic polypeptide
  Synthetic Construct
DIQMTQSPSSLSASVGDRVTITCQASQDISNYLNWYQQKPGKAPKLLIYDASNLETGVPSRFSGSGSGTDFTFTISSLQPEDIATYYCQQFFNFPTFGGGTKVEIK

SEQ ID NO: 648 - protein, 122 aa, Artificial Sequence
  Description of Artificial Sequence: Synthetic polypeptide
  Synthetic Construct
QVQLQESGPGLVKPSETLSLTCTVSGGSISSYYWSWIRQPPGKGLEWIGSIYYSGSTNYNPSLKSRVTISVDTSKNQFSLKLSSVTAADTAVYYCARDGGGEYPSGTPFDIWGQGTMVTVSS

SEQ ID NO: 649 - protein, 107 aa, Artificial Sequence
  Description of Artificial Sequence: Synthetic polypeptide
  Synthetic Construct
DIQMTQSPSSLSASVGDRVTITCQASQDISNYLNWYQQKPGKAPKLLIYDASNLETGVPSRFSGSGSGTDFTFTISSLQPEDIATYYCQQFIDLPFTFGGGTKVEIK

SEQ ID NO: 650 - protein, 107 aa, Artificial Sequence
  Description of Artificial Sequence: Synthetic polypeptide
  Synthetic Construct
DIQMTQSPSSLSASVGDRVTITCQASQDISNYLNWYQQKPGKAPKLLIYDASNLETGVPSRFSGSGSGTDFTFTISSLQPEDIATYYCQQYYDLPFTFGGGTKVEIK

SEQ ID NO: 651 - protein, 117 aa, Artificial Sequence
  Description of Artificial Sequence: Synthetic polypeptide
  Synthetic Construct
QVQLQESGPGLVKPSETLSLTCTVSGGSISSYYWSWIRQPPGKGLEWIGSIYYSGSTNYNPSLKSRVTISVDTSKNQFSLKLSSVTAADTAVYYCARSGMASFFDYWGQGTLVTVSS

SEQ ID NO: 652 - protein, 108 aa, Artificial Sequence
  Description of Artificial Sequence: Synthetic polypeptide
  Synthetic Construct
EIVLTQSPGTLSLSPGERATLSCRASQSVSSDYLAWYQQKPGQAPRLLIYGASSRATGIPDRFSGSGSGTDFTLTISRLEPEDFAVYYCQQFSSHPFTFGGGTKVEIK

SEQ ID NO: 653 - protein, 108 aa, Artificial Sequence
  Description of Artificial Sequence: Synthetic polypeptide
  Synthetic Construct
EIVMTQSPGTLSLSPGERATLSCRASQSVSSSYLAWYQQKPGQAPRLLIYGASSRATGIPDRFSGSGSGTDFTLTISRLEPEDFAVYYCQQDDRSPYTFGGGTKVEIK

SEQ ID NO: 654 - protein, 117 aa, Artificial Sequence
  Description of Artificial Sequence: Synthetic polypeptide
  Synthetic Construct
EVQLLESGGGLVQPGGSLRLSCAASGFTFSSYAMSWVRQAPGKGLEWVSAISGSGGSTYYADSVKGRFTISRDNSKNTLYLQMNSLRAEDTAVYYCAKLGGHSMDVWGQGTTVTVSS

SEQ ID NO: 655 - protein, 113 aa, Artificial Sequence
  Description of Artificial Sequence: Synthetic polypeptide
  Synthetic Construct
DIVMTQSPDSLAVSLGERATINCKSSQSVLYSSNNKNYLAWYQQKPGQPPKLLISWASTRESGVPDRFSGSGSGTDFTLTISSLQAEDVAVYYCQQAYLPPITFGGGTKVEIK

SEQ ID NO: 656 - protein, 118 aa, Artificial Sequence
  Description of Artificial Sequence: Synthetic polypeptide
  Synthetic Construct
EVQLLESGGGLVQPGGSLRLSCAASGFTFSSYAMSWVRQAPGKGLEWVSAISGSGGSTYYADSVKGRFTISRDNSKNTLYLQMNSLRAEDTAVYYCAKPLKRGRGFYWGQGTLVTVSS

SEQ ID NO: 657 - protein, 108 aa, Artificial Sequence
  Description of Artificial Sequence: Synthetic polypeptide
  Synthetic Construct
DIQMTQSPSSLSASVGDRVTITCRASQSISSYLNWYQQKPGKAPKLLIYAASSLQSGVPSRFSGSGSGTDFTLTISSLQPEDFATYYCQQAFSPPPWTFGGGTKVEIK

SEQ ID NO: 658 - protein, 117 aa, Artificial Sequence
  Description of Artificial Sequence: Synthetic polypeptide
  Synthetic Construct
EVQLLESGGGLVQPGGSLRLSCAASGFTFSSYAMSWVRQAPGKGLEWVSVISGSGGSTYYADSVKGRFTISRDNSKNTLYLQMNSLRAEDTAVYYCAKEGRTITMDWGQGTLVTVSS

SEQ ID NO: 659 - protein, 107 aa, Artificial Sequence
  Description of Artificial Sequence: Synthetic polypeptide
  Synthetic Construct
EIVLTQSPGTLSLSPGERATLSCRASQSVSSSYLAWYQQKPGQAPRLLIYGASSRATGIPDRFSGSGSGTDFTLTISRLEPEDFAVYYCQQDDRSPTFGGGTKVEIK

SEQ ID NO: 660 - protein, 117 aa, Artificial Sequence
  Description of Artificial Sequence: Synthetic polypeptide
  Synthetic Construct
EVQLLESGGGLVQPGGSLRLSCAASGFTFSSYAMSWVRQAPGKGLEWVSVISGSGGSTYYADSVKGRFTISRDNSKNTLYLQMNSLRAEDTAVYYCAKDQYSVLDYWGQGTLVTVSS

SEQ ID NO: 661 - protein, 107 aa, Artificial Sequence
  Description of Artificial Sequence: Synthetic polypeptide
  Synthetic Construct
EIVLTQSPATLSLSPGERATLSCRASQSVSSYLAWYQQKPGQAPRLLIYDASNRATGIPARFSGSGSGTDFTLTISSLEPEDFAVYYCQQEFDLPFTFGGGTKVEIK

SEQ ID NO: 662 - protein, 120 aa, Artificial Sequence
  Description of Artificial Sequence: Synthetic polypeptide
  Synthetic Construct
EVQLLESGGGLVQPGGSLRLSCAASGFTFSSYAMSWVRQAPGKGLEWVSAISGSGGSTYYADSVKGRFTISRDNSKNTLYLQMNSLRAEDTAVYYCAKKYSSRGVYFDYWGQGTLVTVSS

SEQ ID NO: 663 - protein, 107 aa, Artificial Sequence
  Description of Artificial Sequence: Synthetic polypeptide
  Synthetic Construct
EIVLTQSPATLSLSPGERATLSCRASQSVSSYLAWYQQKPGQAPRLLIYDASNRATGIPARFSGSGSGTDFTLTISSLEPEDFAVYYCQQYNNFPPTFGGGTKVEIK

SEQ ID NO: 664 - protein, 124 aa, Artificial Sequence
  Description of Artificial Sequence: Synthetic polypeptide
  Synthetic Construct
EVQLLESGGGLVQPGGSLRLSCAASGFTFSSYAMSWVRQAPGKGLEWVSAISGSGGSTYYADSVKGRFTISRDNSKNTLYLQMNSLRAEDTAVYYCARLGGAVGARHVTYFDYWGQGTLVTVSS

SEQ ID NO: 665 - protein, 107 aa, Artificial Sequence
  Description of Artificial Sequence: Synthetic polypeptide
  Synthetic Construct
EIVLTQSPATLSLSPGERATLSCRASQSVSSYLAWYQQKPGQAPRLLIYDASKRATGIPARFSGSGSGTDFTLTISSLEPEDFAVYYCQQRYLRPITFGGGTKVEIK

SEQ ID NO: 666 - protein, 121 aa, Artificial Sequence
  Description of Artificial Sequence: Synthetic polypeptide
  Synthetic Construct
QVQLVESGGGVVQPGRSLRLSCAASGFTFSSYGMHWVRQAPGKGLEWVAVISYDGSNKYYADSVKGRFTISRDNSKNTLYLQMNSLRAEDTAVYYCARGQYYGGSGWFDPWGQGTLVTVSS

SEQ ID NO: 667 - protein, 107 aa, Artificial Sequence
  Description of Artificial Sequence: Synthetic polypeptide
  Synthetic Construct
EIVLTQSPGTLSLSPGERATLSCRASQSVSSSYLAWYQQKPGQAPRLLIYGASSRATGIPDRFSGSGSGTDFTLTISRLEPEDFAVYYCQQPGAVPTFGGGTKVEIK

SEQ ID NO: 668 - protein, 119 aa, Artificial Sequence
  Description of Artificial Sequence: Synthetic polypeptide
  Synthetic Construct
EVQLLESGGGLVQPGGSLRLSCAASGFTFSSYAMSWVRQAPGKGLEWVSAISGSGGSTYYADSVKGRFTISRDNSKNTLYLQMNSLRAEDTAVYYCARLGQEYAYFQHWGQGTLVTVSS

SEQ ID NO: 669 - protein, 107 aa, Artificial Sequence
  Description of Artificial Sequence: Synthetic polypeptide
  Synthetic Construct
DIQMTQSPSSLSASVGDRVTITCRASQSISSYLNWYQQKPGKAPKLLIYGASSLQSGVPSRFSGSGSGTDFTLTISSLQPEDFATYYCQQVYITPITFGGGTKVEIK

SEQ ID NO: 670 - protein, 121 aa, Artificial Sequence
  Description of Artificial Sequence: Synthetic polypeptide
  Synthetic Construct
QVQLVESGGGVVQPGRSLRLSCAASGFTFSSYGMHWVRQAPGKGLEWVALIWYDGSNKYYADSVKGRFTISRDNSKNTLYLQMNSLRAEDTAVYYCARRRDGYYDEVFDIWGQGTMVTVSS

SEQ ID NO: 671 - protein, 107 aa, Artificial Sequence
  Description of Artificial Sequence: Synthetic polypeptide
  Synthetic Construct
DIQLTQSPSSLSASVGDRVTITCQASQDISNFLNWYQQKPGKAPKLLIYDASNLETGVPSRFSGSGSGTDFTFTISSLQPEDIATYYCQQPVDLPFTFGGGTKVEIK

SEQ ID NO: 672 - protein, 119 aa, Artificial Sequence
  Description of Artificial Sequence: Synthetic polypeptide
  Synthetic Construct
EVQLLESGGGLVQPGGSLRLSCAASGFTFSSYAMSWVRQAPGKGLEWVSAISGSGGSTYYADSVKGRFTISRDNSKNTLYLQMNSLRAEDTAVYYCARVPKHYVVLDYWGQGTLVTVSS

SEQ ID NO: 673 - protein, 107 aa, Artificial Sequence
  Description of Artificial Sequence: Synthetic polypeptide
  Synthetic Construct
EIVLTQSPATLSLSPGERATLSCRASQSVSSYLAWYQQKPGQAPRLLIYDASNRATGIPARFSGSGSGTDFTLTISSLEPEDFAVYYCQQYSFFPPTFGGGTKVEIK

SEQ ID NO: 674 - protein, 117 aa, Artificial Sequence
  Description of Artificial Sequence: Synthetic polypeptide
  Synthetic Construct
QVQLVESGGGVVQPGRSLRLSCAASGFTFSSYGMHWVRQAPGKGLEWVAVISYDGSNKYYADSVKGRFTISRDNSKNTLYLQMNSLRAEDTAVYYCARAGGHLFDYWGQGTLVTVSS

SEQ ID NO: 675 - protein, 107 aa, Artificial Sequence
  Description of Artificial Sequence: Synthetic polypeptide
  Synthetic Construct
EIVLTQSPATLSLSPGERATLSCRASQSVSSYLAWYQQKPGQAPRLLIYDASNRATGIPARFSGSGSGTDFTLTISSLEPEDFAVYYCQQDSSFPPTFGGGTKVEIK

SEQ ID NO: 676 - protein, 122 aa, Artificial Sequence
  Description of Artificial Sequence: Synthetic polypeptide
  Synthetic Construct
QVQLVESGGGVVQPGRSLRLSCAASGFTFSSYGMHWVRQAPGKGLEWVAVISYDGSNKYYADSVKGRFTISRDNSKNTLYLQMNSLRAEDTAVYYCARDRGGEYVDFAFDIWGQGTMVTVSS

SEQ ID NO: 677 - protein, 107 aa, Artificial Sequence
  Description of Artificial Sequence: Synthetic polypeptide
  Synthetic Construct
DIQMTQSPSSLSASVGDRVTITCRASQSISSYLNWYQQKPGKAPKLLIYAASSLQSGVPSRFSGSGSGTDFTLTISSLQPEDFATYYCQQSDFPPWTFGGGTKVEIK

SEQ ID NO: 678 - protein, 122 aa, Artificial Sequence
  Description of Artificial Sequence: Synthetic polypeptide
  Synthetic Construct
EVQLLESGGGLVQPGGSLRLSCAASGFTFSSYAMSWVRQAPGKGLEWVSAISGSGGSTYYADSVKGRFTISRDNSKNTLYLQMNSLRAEDTAVYYCARTRSGYGASNYFDYWGQGTLVTVSS

SEQ ID NO: 679 - protein, 107 aa, Artificial Sequence
  Description of Artificial Sequence: Synthetic polypeptide
  Synthetic Construct
DIQMTQSPSSLSASVGDRVTITCRASQSISSYLNWYQQKPGKAPKLLIYAASSLQSGVPSRFSGSGSGTDFTLTISSLQPEDFATYYCQQGYSAPITFGGGTKVEIK

SEQ ID NO: 680 - protein, 122 aa, Artificial Sequence
  Description of Artificial Sequence: Synthetic polypeptide
  Synthetic Construct
QVQLVESGGGVVQPGRSLRLSCAASGFTFSTYGMHWVRQAPGKGLEWVAVIWYDGSNKYYADSVKGRFTISRDNSKNTLYLQMNSLRAEDTAVYYCARGTGAAAASPAFDIWGQGTMVTVSS

SEQ ID NO: 681 - protein, 106 aa, Artificial Sequence
  Description of Artificial Sequence: Synthetic polypeptide
  Synthetic Construct
EIVLTQSPATLSLSPGERATLSCRASQSVSSYLAWYQQKPGQAPRLLIYDASNRATGIPARFSGSGSGTDFTLTISSLEPEDFAVYYCQQLFDWPTFGGGTKVEIK

SEQ ID NO: 682 - protein, 119 aa, Artificial Sequence
  Description of Artificial Sequence: Synthetic polypeptide
  Synthetic Construct
EVQLLESGGGLVQPGGSLRLSCAASGFTFSSYAMSWVRQAPGKGLEWVSAISGSGGSTYYADSVKGRFTISRDNSKNTLYLQMNSLRAEDTAVYYCARVGQYMLGMDVWGQGTTVTVSS

SEQ ID NO: 683 - protein, 106 aa, Artificial Sequence
  Description of Artificial Sequence: Synthetic polypeptide
  Synthetic Construct
EIVLTQSPATLSLSPGERATLSCRASQSVSSYLAWYQQKPGQAPRLLIYDASNRATGIPARFSGSGSGTDFTLTISSLEPEDFAVYYCQQRAFLFTFGGGTKVEIK

SEQ ID NO: 684 - protein, 125 aa, Artificial Sequence
  Description of Artificial Sequence: Synthetic polypeptide
  Synthetic Construct
QVQLVESGGGVVQPGRSLRLSCAASGFTFSTYGMHWVRQAPGKGLEWVAVIWYDGSNKYYADSVKGRFTISRDNSKNTLYLQMNSLRAEDTAVYYCARGAPVDYGGIEPEYFQHWGQGTLVTVSS

SEQ ID NO: 685 - protein, 107 aa, Artificial Sequence
  Description of Artificial Sequence: Synthetic polypeptide
  Synthetic Construct
EIVLTQSPATLSLSPGERATLSCRASQSVSSYLAWYQQKPGQAPRLLIYDASNRATGIPARFSGSGSGTDFTLTISSLEPEDFAVYYCQQIDFLPYTFGGGTKVEIK

SEQ ID NO: 686 - protein, 119 aa, Artificial Sequence
  Description of Artificial Sequence: Synthetic polypeptide
  Synthetic Construct
EVQLLESGGGLVQPGGSLRLSCAASGFTFSSYAMSWVRQAPGKGLEWVSAISGSGGSTYYADSVKGRFTISRDNSKNTLYLQMNSLRAEDTAVYYCAKHYHVGIAFDIWGQGTMVTVSS

SEQ ID NO: 687 - protein, 107 aa, Artificial Sequence
  Description of Artificial Sequence: Synthetic polypeptide
  Synthetic Construct
DIQMTQSPSSLSASVGDRVTITCRASQSISSYLNWYQQKPGKAPKLLIYAASSLQSGVPSRFSGSGSGTDFTLTISSLQPEDFATYYCQQVYSPPITFGGGTKVEIK

SEQ ID NO: 688 - protein, 107 aa, Artificial Sequence
  Description of Artificial Sequence: Synthetic polypeptide
  Synthetic Construct
DIQMTQSPSSLSASVGDRVTITCRASQSISSYLNWYQQKPGKAPKLLIYAASSLQSGVPSRFSGSGSGTDFTLTISSLQPEDFATYYCQQGYAAPITFGGGTKVEIK

SEQ ID NO: 689 - protein, 120 aa, Artificial Sequence
  Description of Artificial Sequence: Synthetic polypeptide
  Synthetic Construct
EVQLLESGGGLVQPGGSLRLSCAASGFTFSTYAMSWVRQAPGKGLEWVSAISGSGGSTYYADSVKGRFTISRDNSKNTLYLQMNSLRAEDTAVYYCARAMARKSVAFDIWGQGTMVTVSS

SEQ ID NO: 690 - protein, 107 aa, Artificial Sequence
  Description of Artificial Sequence: Synthetic polypeptide
  Synthetic Construct
EIVLTQSPATLSLSPGERATLSCRASQSVSSYLAWYQQKPGQAPRLLIYDASNRATGIPARFSGSGSGTDFTLTISSLEPEDFTVYYCQQRYALPITFGGGTKVEIK

SEQ ID NO: 691 - protein, 121 aa, Artificial Sequence
  Description of Artificial Sequence: Synthetic polypeptide
  Synthetic Construct
EVQLLESGGGLVQPGGSLRLSCAASGFTFSSSAMSWVRQAPGKGLEWVSAISGSGGSTYYADSVKGRFTISRDNSKNTLYLQMNSLRAEDTAVYYCAKVPSYQRGTAFDPWGQGTLVTVSS

SEQ ID NO: 692 - protein, 108 aa, Artificial Sequence
  Description of Artificial Sequence: Synthetic polypeptide
  Synthetic Construct
EIVLTQSPGTLSLSPGERATLSCRASQSVSSSYLAWYQQKPGQAPRLLIYGASSRATGIPDRFSGSGSGTDFTLTISRLEPEDFAVYYCQQYASPPITFGGGTKVEIK

SEQ ID NO: 693 - protein, 121 aa, Artificial Sequence
  Description of Artificial Sequence: Synthetic polypeptide
  Synthetic Construct
EVQLLESGGGLVQPGGSLRLSCAASGFTFSSSAMSWVRQAPGKGLEWVSAISGSGGSTYYADSVKGRFTISRDNSKNTLYLQMNSLRAEDTAVYYCAKSPAVAGIYRADYWGQGTLVTVSS

SEQ ID NO: 694 - protein, 107 aa, Artificial Sequence
  Description of Artificial Sequence: Synthetic polypeptide
  Synthetic Construct
DIQMTQSPSSLSASVGDRVTITCRASQSISRYLNWYQQKPGKAPKLLIYAASSLQSGVPSRFSGSGSGTDFTLTISSLQPEDFATYYCQQVYSTPITFGGGTKVEIK

SEQ ID NO: 695 - protein, 106 aa, Artificial Sequence
  Description of Artificial Sequence: Synthetic polypeptide
  Synthetic Construct
EIVMTQSPATLSLSPGERATLSCRASQSVSSYLAWYQQKPGQAPRLLIYDSSNRATGIPARFSGSGSGTDFTLTISSLEPEDFAVYYCQQLVHWPTFGGGTKVEIK

SEQ ID NO: 696 - protein, 124 aa, Artificial Sequence
  Description of Artificial Sequence: Synthetic polypeptide
  Synthetic Construct
QVQLVQSGAEVKKPGASVKVSCKASGYTFTSYYMHWVRQAPGQGLEWMGIINPSGGSTSYAQKFQGRVTMTRDTSTSTVYMELSSLRSEDTAVYYCARGPGYTTALDYYYMDVWGKGTTVTVSS

SEQ ID NO: 697 - protein, 106 aa, Artificial Sequence
  Description of Artificial Sequence: Synthetic polypeptide
  Synthetic Construct
EIVMTQSPATLSVSPGERATLSCRASQSVSSNLAWYQQKPGQAPRLLIYGASTRATGIPARFSGSGSGTEFTLTISSLQSEDFAVYYCQQLDDWFTFGGGTKVEIK

SEQ ID NO: 698 - protein, 116 aa, Artificial Sequence
  Description of Artificial Sequence: Synthetic polypeptide
  Synthetic Construct
QVQLVQSGAEVKKPGASVKVSCKASGYTFTSYYMHWVRQAPGQGLEWMGIINPSGGSTSYAQKFQGRVTMTRDTSTSTVYMELSSLRSEDTAVYYCARPAKTADYWGQGTLVTVSS

SEQ ID NO: 699 - protein, 107 aa, Artificial Sequence
  Description of Artificial Sequence: Synthetic polypeptide
  Synthetic Construct
EIVLTQSPATLSLSPGERATLSCRASQSVSSYLAWYQQKPGQAPRLLIYDSSNRATGIPARFSGSGSGTDFTLTISSLEPEDFAVYYCQQRSNYPITFGGGTKVEIK

SEQ ID NO: 700 - protein, 116 aa, Artificial Sequence
  Description of Artificial Sequence: Synthetic polypeptide
  Synthetic Construct
QVQLVQSGAEVKKPGASVKVSCKASGYTFTSYYMHWVRQAPGQGLEWMGIINPSGGSTTYAQKFQGRVTMTRDTSTSTVYMELSSLRSEDTAVYYCARPGKSMDVWGQGTTVTVSS

SEQ ID NO: 701 - protein, 107 aa, Artificial Sequence
  Description of Artificial Sequence: Synthetic polypeptide
  Synthetic Construct
EIVLTQSPGTLSLSPGERATLSCRASQSVSSYLAWYQQKPGQAPRLLIYDASNRATGIPARFSGSGSGTDFTLTISSLEPEDFAVYYCQQRILYPITFGGGTKVEIK

SEQ ID NO: 702 - protein, 107 aa, Artificial Sequence
  Description of Artificial Sequence: Synthetic polypeptide
  Synthetic Construct
EIVLTQSPATLSLSPGERATLSCRASQSVSSYLAWYQQKPGQAPRLLIYDASNRATGIPARFSGSGSGTDFTLTISSLEPEDFAVYYCQQRAAYPITFGGGTKVEIK

SEQ ID NO: 703 - protein, 107 aa, Artificial Sequence
  Description of Artificial Sequence: Synthetic polypeptide
  Synthetic Construct
EIVLTQSPATLSLSPGERATLSCRASQSVSSYLAWYQQKPGQAPRLLIYDASKRATGIPARFSGSGSGTDFTLTISSLEPEDFAVYYCQQRTSHPITFGGGTKVEIK

SEQ ID NO: 704 - protein, 108 aa, Artificial Sequence
  Description of Artificial Sequence: Synthetic polypeptide
  Synthetic Construct
EIVLTQSPGTLSLSPGERATLSCRASQSVSSSYLAWYQQKPGQAPRLLIYGASSRATGIPDRFSGSGSGTDFTLTISRLEPEDFAVYYCQQYAGSPFTFGGGTKVEIK

SEQ ID NO: 705 - protein, 121 aa, Artificial Sequence
  Description of Artificial Sequence: Synthetic polypeptide
  Synthetic Construct
QVQLVQSGAEVKKPGASVKVSCKASGYTFTSYYMHWVRQAPGQGLEWMGIINPSGGSTSYAQKFQGRVTMTRDTSTSTVYMELSSLRSEDTAVYYCARGVGGQDYYYMDVWGKGTTVTVSS

SEQ ID NO: 706 - protein, 106 aa, Artificial Sequence
  Description of Artificial Sequence: Synthetic polypeptide
  Synthetic Construct
DIQMTQSPSSLSASVGDRVTITCRASQSISSYLNWYQQKPGKAPKLLIYAASSLQSGVPSRFSGSGSGTDFTLTISSLQPEDFATYYCQQFDDVFTFGGGTKVEIK

SEQ ID NO: 707 - protein, 108 aa, Artificial Sequence
  Description of Artificial Sequence: Synthetic polypeptide
  Synthetic Construct
EIVLTQSPGTLSLSPGERATLSCRASQSVSSSYLAWYQQKPGQAPRLLIYGASSRATGIPDRFSGSGSGTDFTLTISRLEPEDFAVYYCQQYVNSPFTFGGGTKVEIK

SEQ ID NO: 708 - protein, 107 aa, Artificial Sequence
  Description of Artificial Sequence: Synthetic polypeptide
  Synthetic Construct
DIQMTQSPSSLSASVGDRVTITCRASQSINSYLNWYQQKPGKAPKLLIYAASSLQSGVPSRFSGSGSGTDFTLTISSLQPEDFATYYCQQSDDDPFTFGGGTKVEIK

SEQ ID NO: 709 - protein, 120 aa, Artificial Sequence
  Description of Artificial Sequence: Synthetic polypeptide
  Synthetic Construct
QVQLVQSGAEVKKPGASVKVSCKASGYTFTGSYMHWVRQAPGQGLEWMGWINPNSGGTNYAQKFQGRVTMTRDTSISTAYMELSRLRSDDTAVYYCARGPLYHPMIFDYWGQGTLVTVSS

SEQ ID NO: 710 - protein, 107 aa, Artificial Sequence
  Description of Artificial Sequence: Synthetic polypeptide
  Synthetic Construct
EIVLTQSPATLSLSPGERATLSCRASQSVSSYLAWYQQKPGQAPRLLIYDASNRATGIPARFSGSGSGTDFTLTISSLEPEDFAVYYCQQLSTYPLTFGGGTKVEIK

SEQ ID NO: 711 - protein, 115 aa, Artificial Sequence
  Description of Artificial Sequence: Synthetic polypeptide
  Synthetic Construct
QVQLVQSGAEVKKPGASVKVSCKASGYTFTGYYMHWVRQAPGQGLEWMGSINPNSGGTNYAQKFQGRVTMTRDTSISTAYMELSRLRSDDTAVYYCARASSVDNWGQGTLVTVSS

SEQ ID NO: 712 - protein, 107 aa, Artificial Sequence
  Description of Artificial Sequence: Synthetic polypeptide
  Synthetic Construct
EIVMTQSPATLSLSPGERATLSCRASQSVSSYLAWYQQKPGQAPRLLIYDASNRATGIPARFSGSGSGTDFTLTISSLEPEDFAVYYCQQRSVYPITFGGGTKVEIK

SEQ ID NO: 713 - protein, 126 aa, Artificial Sequence
  Description of Artificial Sequence: Synthetic polypeptide
  Synthetic Construct
QVQLVQSGAEVKKPGASVKVSCKASGYTFTNYGISWVRQAPGQGLEWMGWISAYNGNTNYAQKLQGRVTMTTDTSTSTAYMELRSLRSDDTAVYYCARGPTKAYYGSGSYVVFDPWGQGTLVTVSS

SEQ ID NO: 714 - protein, 107 aa, Artificial Sequence
  Description of Artificial Sequence: Synthetic polypeptide
  Synthetic Construct
EIVLTQSPATLSLSPGERATLSCRASQSVSSYLAWYQQKPGQAPRLLIYDASKRATGIPARFSGSGSGTDFTLTISSLEPEDFAVYYCQQVSLFPLTFGGGTKVEIK

SEQ ID NO: 715 - protein, 122 aa, Artificial Sequence
  Description of Artificial Sequence: Synthetic polypeptide
  Synthetic Construct
EVQLVQSGAEVKKPGESLKISCKGSGYSFTSYWIGWVRQMPGKGLEWMGIIYPGDSDTRYSPSFQGQVTISADKSISTAYLQWSSLKASDTAMYYCARLGIYSTGATAFDIWGQGTMVTVSS

SEQ ID NO: 716 - protein, 108 aa, Artificial Sequence
  Description of Artificial Sequence: Synthetic polypeptide
  Synthetic Construct
DIQMTQSPSTLSASVGDRVTITCRASQSISSWLAWYQQKPGKAPKLLIYDASSLESGVPSRFSGSGSGTEFTLTISSLQPDDFATYYCLDYNSYSPITFGGGTKVEIK

SEQ ID NO: 717 - protein, 119 aa, Artificial Sequence
  Description of Artificial Sequence: Synthetic polypeptide
  Synthetic Construct
QVQLVQSGAEVKKPGASVKVSCKASGYTFTGSYMHWVRQAPGQGLEWMGWINPNSGGTNYAQKFQGRVTMTRDTSISTAYMELSRLRSDDTAVYYCARGGVWYSLFDIWGQGTMVTVSS

SEQ ID NO: 718 - protein, 107 aa, Artificial Sequence
  Description of Artificial Sequence: Synthetic polypeptide
  Synthetic Construct
DIQMTQSPSSLSASVGDRVTITCQASQDISNYLNWYQQKPGKAPKLLIYDASNLETGVPSRFSGSGSGTDFTFTISSLQPEDIATYYCQQHIALPFTFGGGTKVEIK

SEQ ID NO: 719 - protein, 116 aa, Artificial Sequence
  Description of Artificial Sequence: Synthetic polypeptide
  Synthetic Construct
QVQLVQSGAEVKKPGASVKVSCKASGYTFTGYYMHWVRQAPGQGLEWMGWINPNSGGTSYAQKFQGRVTMTRDTSISTAYMELSRLRSDDTAVYYCARASKMGDDWGQGTLVTVSS

SEQ ID NO: 720 - protein, 107 aa, Artificial Sequence
  Description of Artificial Sequence: Synthetic polypeptide
  Synthetic Construct
EIVLTQSPATLSLSPGERATLSCRASQSVSSYLAWYQQKPGQAPRLLIYDASKRATGIPARFSGSGSGTDFTLTISSLEPEDFAVYYCQQRASMPITFGGGTKVEIK

SEQ ID NO: 721 - protein, 120 aa, Artificial Sequence
  Description of Artificial Sequence: Synthetic polypeptide
  Synthetic Construct
QVQLVQSGAEVKKPGASVKVSCKASGYTFTSYGIHWVRQAPGQGLEWMGWISAYNGNTNYAQKLQGRVTMTTDTSTSTAYMELRSLRSDDTAVYYCARGGVPRVSYFQHWGQGTLVTVSS

SEQ ID NO: 722 - protein, 107 aa, Artificial Sequence
  Description of Artificial Sequence: Synthetic polypeptide
  Synthetic Construct
EIVLTQSPATLSLSPGERATLSCRASQSVSSYLAWYQQKPGQAPRLLIYDSSNRATGIPARFSGSGSGTDFTLTISSLEPEDFAVYYCQQAFNRPPTFGGGTKVEIK

SEQ ID NO: 723 - protein, 123 aa, Artificial Sequence
  Description of Artificial Sequence: Synthetic polypeptide
  Synthetic Construct
EVQLVQSGAEVKKPGESLKISCKGSGYSFTSYWIGWVRQMPGKGLEWMGIIYPGDSDTRYSPSFQGQVTISADKSISTAYLQWSSLKASDTAMYYCARAGHYDDWSGLGLDVWGQGTMVTVSS

SEQ ID NO: 724 - protein, 107 aa, Artificial Sequence
  Description of Artificial Sequence: Synthetic polypeptide
  Synthetic Construct
EIVLTQSPATLSLSPGERATLSCRASQSVSSYLAWYQQKPGQAPRLLIYDASKRATGIPARFSGSGSGTDFTLTISSLEPEDFAVYYCQQSSVHPYTFGGGTKVEIK

SEQ ID NO: 725 - protein, 120 aa, Artificial Sequence
  Description of Artificial Sequence: Synthetic polypeptide
  Synthetic Construct
QVQLVQSGAEVKKPGASVKVSCKASGYTFTSYGISWVRQAPGQGLEWMGWISTYNGNTNYAQKLQGRVTMTTDTSTSTAYMELRSLRSDDTAVYYCARGSGSGYDSWYDWGQGTLVTVSS

SEQ ID NO: 726 - protein, 107 aa, Artificial Sequence
  Description of Artificial Sequence: Synthetic polypeptide
  Synthetic Construct
DIQMTQSPSSVSASVGDRVTITCRASQGIDSWLAWYQQKPGKAPKLLIYAASSLQSGVPSRFSGSGSGTDFTLTISSLQPEDFATYYCQQAYSLPPTFGGGTKVEIK

SEQ ID NO: 727 - protein, 122 aa, Artificial Sequence
  Description of Artificial Sequence: Synthetic polypeptide
  Synthetic Construct
EVQLVQSGAEVKKPGESLKISCKGSGYSFTSYWIGWVRQMPGKGLEWMGIIYPGDSDTRYSPSFQGQVTISADKSISTAYLQWSSLKASDTAMYYCARLGRWSSGSTAFDIWGQGTMVTVSS

SEQ ID NO: 728 - protein, 106 aa, Artificial Sequence
  Description of Artificial Sequence: Synthetic polypeptide
  Synthetic Construct
EIVMTQSPATLSVSPGERATLSCRASQSVSSNLAWYQQKPGQAPRLLIYGASTRATGIPARFSGSGSGTEFTLTISSLQSEDFAVYYCQQDDDGYTFGGGTKVEIK

SEQ ID NO: 729 - protein, 122 aa, Artificial Sequence
  Description of Artificial Sequence: Synthetic polypeptide
  Synthetic Construct
EVQLVQSGAEVKKPGESLKISCKGSGYSFTSYWIGWVRQMPGKGLEWMGIIYPGDSDTRYSPSFQGQVTISADKSISTAYLQWSSLKASDTAMYYCARLGRKPSGSVAFDIWGQGTMVTVSS

SEQ ID NO: 730 - protein, 107 aa, Artificial Sequence
  Description of Artificial Sequence: Synthetic polypeptide
  Synthetic Construct
EIVLTQSPATLSLSPGERATLSCRASQSVSSYLAWYQQKPGQAPRLLIYDASNRATGIPARFSGSGSGTDFTLTISSLEPEDFAVYYCQQDYSWPYTFGGGTKVEIK

SEQ ID NO: 731 - protein, 117 aa, Artificial Sequence
  Description of Artificial Sequence: Synthetic polypeptide
  Synthetic Construct
QVQLVQSGAEVKKPGASVKVSCKASGYTFTGSYMHWVRQAPGQGLEWMGWINPNSGGTNYAQKFQGRVTMTRDTSISTAYMELSRLRSDDTAVYYCARAGHKTHDYWGQGTLVTVSS

SEQ ID NO: 732 - protein, 107 aa, Artificial Sequence
  Description of Artificial Sequence: Synthetic polypeptide
  Synthetic Construct
EIVLTQSPGTLSLSPGERATLSCRASQSVSSYLAWYQQKPGQAPRLLIYDASNRATGIPARFSGSGSGTDFTLTISSLEPEDFAVYYCQQRSAYPITFGGGTKVEIK

SEQ ID NO: 733 - protein, 107 aa, Artificial Sequence
  Description of Artificial Sequence: Synthetic polypeptide
  Synthetic Construct
EIVLTQSPATLSLSPGERATLSCRASQSVSSYLAWYQQKPGQAPRLLIYDASNRATGIPARFSGSGSGTDFTLTISSLEPEDFAVYYCQQRSHFPITFGGGTKVEIK

SEQ ID NO: 734 - protein, 116 aa, Artificial Sequence
  Description of Artificial Sequence: Synthetic polypeptide
  Synthetic Construct
QVQLVESGGGVVQPGRSLRLSCAASGFTFSSYGMHWVRQAPGKGLEWVALIWYDGSNKYYADSVKGRFTISRDNSKNTLYLQMNSLRAEDTAVYYCAKPGSMTDYWGQGTLVTVSS

SEQ ID NO: 735 - protein, 107 aa, Artificial Sequence
  Description of Artificial Sequence: Synthetic polypeptide
  Synthetic Construct
EIVLTQSPATLSLSPGERATLSCRASQSVSSYLAWYQQKPGQAPRLLIYDASNRATGIPARFSGSGSGTDFTLTISSLEPEDFAVYYCQQRANYPITFGGGTKVEIK

SEQ ID NO: 736 - protein, 117 aa, Artificial Sequence
  Description of Artificial Sequence: Synthetic polypeptide
  Synthetic Construct
QVQLVQSGAEVKKPGASVKVSCKASGYTFTGSYMHWVRQAPGQGLEWMGWINPNSGGTNYAQKFQGRVTMTRDTSISTAYMELSRLRSDDTAVYYCARAKSVDHDYWGQGTLVTVSS

SEQ ID NO: 737 - protein, 107 aa, Artificial Sequence
  Description of Artificial Sequence: Synthetic polypeptide
  Synthetic Construct
EIVLTQSPATLSLSPGERATLSCRASQSVSSYLAWYQQKPGQAPRLLIYDASNRATGIPARFSGSGSGTDFTLTISSLEPEDFAVYYCQQRADYPITFGGGTKVEIK

SEQ ID NO: 738 - protein, 107 aa, Artificial Sequence
  Description of Artificial Sequence: Synthetic polypeptide
  Synthetic Construct
EIVLTQSPATLSLSPGERATLSCRASQSVSSYLAWYQQKPGQAPRLLIYDASNRATGIPARFSGSGSGTDFTLTISSLEPEDFAVYYCQQRSVYPITFGGGTKVEIK

SEQ ID NO: 739 - protein, 122 aa, Artificial Sequence
  Description of Artificial Sequence: Synthetic polypeptide
  Synthetic Construct
QVQLVQSGAEVKKPGASVKVSCKASGYTFTSYYMHWVRQAPGQGLEWMGIINPSGGSTSYAQKFQGRVTMTRDTSTSTVYMELSSLRSEDTAVYYCARDISTHDYDLAFDIWGQGTMVTVSS

SEQ ID NO: 740 - protein, 108 aa, Artificial Sequence
  Description of Artificial Sequence: Synthetic polypeptide
  Synthetic Construct
EIVMTQSPGTLSLSPGERATLSCRASQSVSSSYLAWYQQKPGQAPRLLIYGASNRATGIPDRFSGSGSGTDFTLTISRLEPEDFAVYYCQQAGSHPFTFGGGTKVEIK

SEQ ID NO: 741 - protein, 117 aa, Artificial Sequence
  Description of Artificial Sequence: Synthetic polypeptide
  Synthetic Construct
QVQLQESGPGLVKPSETLSLTCTVSGGSISSYYWSWIRQPPGKGLEWIGSIYYSGSTNYNPSLKSRVTISVDTSKNQFSLKLSSVTAADTAVYYCARSGTETLFDYWGQGTLVTVSS

SEQ ID NO: 742 - protein, 107 aa, Artificial Sequence
  Description of Artificial Sequence: Synthetic polypeptide
  Synthetic Construct
DIQMTQSPSSLSASVGDRVTITCQASQDITNYLNWYQQKPGKAPKLLIYDASNLETGVPSRFSGSRSGTDFTFTISSLQPEDIATYYCQQDVNYPPTFGGGTKVEIK

SEQ ID NO: 743 - protein, 121 aa, Artificial Sequence
  Description of Artificial Sequence: Synthetic polypeptide
  Synthetic Construct
EVQLVQSGAEVKKPGESLKISCKGSGYSFTSYWIGWVRQMPGKGLEWMGIIYPGDSDTTYSPSFQGQVTISADKSISTAYLQWSSLKASDTAMYYCARAKMLDDGYAFDIWGQGTMVTVSS

SEQ ID NO: 744 - protein, 107 aa, Artificial Sequence
  Description of Artificial Sequence: Synthetic polypeptide
  Synthetic Construct
EIVMTQSPATLSVSPGERATLSCRASQSVSSNLAWYQQKPGQAPRLLIYGASTRATGIPARFSGSGSGTEFTLTISSLQSEDFAVYYCQQDDNYPYTFGGGTKVEIK

SEQ ID NO: 745 - protein, 107 aa, Artificial Sequence
  Description of Artificial Sequence: Synthetic polypeptide
  Synthetic Construct
EIVLTQSPATLSLSPGERATLSCRASQSVSSYLAWYQQKPGQAPRLLIYDASNRATGIPARFSGSGSGTDFTLTISSLEPEDFAVYYCQQRSTFPITFGGGTKVEIK

SEQ ID NO: 746 - protein, 121 aa, Artificial Sequence
  Description of Artificial Sequence: Synthetic polypeptide
  Synthetic Construct
QVQLVQSGAEVKKPGASVKVSCKASGYTFTGYYMHWVRQAPGQGLEWMGWINPNSGGTNYAQKFQGRVTMTRDTSISTAYMELSRLRSDDTAVYYCARDLGYSSLLALDIWGQGTMVTVSS

SEQ ID NO: 747 - protein, 107 aa, Artificial Sequence
  Description of Artificial Sequence: Synthetic polypeptide
  Synthetic Construct
EIVLTQSPATLSLSPGERATLSCRASQSVSSYLAWYQQKPGQAPRLLIYDASNRATGIPARFSGSGSGTDFTLTISSLEPEDFAVYYCQQVSNYPFTFGGGTKVEIK

SEQ ID NO: 748 - protein, 122 aa, Artificial Sequence
  Description of Artificial Sequence: Synthetic polypeptide
  Synthetic Construct
EVQLVESGGGLVKPGGSLRLSCAASGFTFSSYSMNWVRQAPGKGLEWVSSISSSSSYIYYADSVKGRFTISRDNAKNSLYLQMNSLRAEDTAVYYCARGGGRRGDNNWFDPWGQGTLVTVSS

SEQ ID NO: 749 - protein, 113 aa, Artificial Sequence
  Description of Artificial Sequence: Synthetic polypeptide
  Synthetic Construct
DIVMTQSPDSLAVSLGERATINCKSSQSVLYSSNNKNYLAWYQQKPGQPPKLLIYWASTRESGVPDRFSGSGSGTDFTLTISSLQAEDVAVYYCQQYHDAPITFGGGTKVEIK

SEQ ID NO: 750 - protein, 117 aa, Artificial Sequence
  Description of Artificial Sequence: Synthetic polypeptide
  Synthetic Construct
QVQLVESGGGVVQPGRSLRLSCAASGFTFSSYGMHWVRQAPGKGLEWVAVISYDGSNKYYADSVKGRFTISRDNSKNTLYLQMNSLRAEDTAVYYCARGPPHEMDYWGQGTLVTVSS

SEQ ID NO: 751 - protein, 113 aa, Artificial Sequence
  Description of Artificial Sequence: Synthetic polypeptide
  Synthetic Construct
DIVMTQSPDSLAVSLGERATINCKSSQSVLYSSNNKNYLAWYQQKPGQPPKLLIYWASTRESGVPDRFSGSGSGTDFTLTISSLQAEDVAVYYCQQAYVVPPTFGGGTKVEIK

SEQ ID NO: 752 - protein, 119 aa, Artificial Sequence
  Description of Artificial Sequence: Synthetic polypeptide
  Synthetic Construct
QVQLVESGGGVVQPGRSLRLSCAASGFTFSSYGMHWVRQAPGKGLEWVAVIWYDGSNKYYADSVKGRFTISRDNSKNTLYLQMNSLRAEDTAVYYCARTPYPWIYFDLWGRGTLVTVSS

SEQ ID NO: 753 - protein, 107 aa, Artificial Sequence
  Description of Artificial Sequence: Synthetic polypeptide
  Synthetic Construct
EIVLTQSPATLSLSPGERATLSCRASQSVSSYLAWYQQKPGQAPRLLIYDASNRATGIPARFSGSGSGTDFTLTISSLEPEDFAVYYCQQADNWPFTFGGGTKVEIK

SEQ ID NO: 754 - protein, 120 aa, Artificial Sequence
  Description of Artificial Sequence: Synthetic polypeptide
  Synthetic Construct
EVQLVESGGGLVQPGGSLRLSCAASGFTFSSYSMNWVRQAPGKGLEWVSYISGSSSTIYYADSVKGRFTISRDNAKNSLYLQMNSLRAEDTAVYYCARGGRRHYGGMDVWGQGTTVTVSS

SEQ ID NO: 755 - protein, 112 aa, Artificial Sequence
  Description of Artificial Sequence: Synthetic polypeptide
  Synthetic Construct
DIVMTQSPLSLPVTPGEPASISCRSSQSLLHSNGYNYLDWYLQKPGQSPQLLIYLGSHRASGVPDRFSGSGSGTDFTLKISRVEAEDVGVYYCMQALESPRTFGGGTKVEIK

SEQ ID NO: 756 - protein, 122 aa, Artificial Sequence
  Description of Artificial Sequence: Synthetic polypeptide
  Synthetic Construct
QVQLVQSGAEVKKPGSSVKVSCKASGGTFSSYAISWVRQAPGQGLEWMGGIIPIFGTANYAQKFQGRVTITADESTSTAYMELSSLRSEDTAVYYCARGGGTFWSGSWALYWGQGTLVTVSS

SEQ ID NO: 757 - protein, 107 aa, Artificial Sequence
  Description of Artificial Sequence: Synthetic polypeptide
  Synthetic Construct
EIVLTQSPATLSLSPGERATLSCRASQSVSSYLAWYQQKPGQAPRLLIYDASNRATGIPARFSGSGSGTDFTLTISSLEPEDFAVYYCQQYVNWPFTFGGGTKVEIK

SEQ ID NO: 758 - protein, 123 aa, Artificial Sequence
  Description of Artificial Sequence: Synthetic polypeptide
  Synthetic Construct
QVQLVQSGAEVKKPGSSVKVSCKASGGTFSSYAISWVRQAPGQGLEWMGGIIPIFGTANYAQKFQGRVTITADESTSTAYMELSSLRSEDTAVYYCARDSGNYDYWSGALRYWGQGTLVTVSS

SEQ ID NO: 759 - protein, 107 aa, Artificial Sequence
  Description of Artificial Sequence: Synthetic polypeptide
  Synthetic Construct
EIVLTQSPATLSLSPGERATLSCRASQSVSSYLAWYQQKPGQAPRLLIYDASNRATGIPARFSGSGSGTDFTLTISSLEPEDFAVYYCQQSSNWPWTFGGGTKVEIK

SEQ ID NO: 760 - protein, 118 aa, Artificial Sequence
  Description of Artificial Sequence: Synthetic polypeptide
  Synthetic Construct
QVQLQESGPGLVKPSQTLSLTCTVSGGSISSGGYYWSWIRQHPGKGLEWIGYIYYSGSTVYNPSLKSRVTISVDTSKNQFSLKLSSVTAADTAVYYCARVSSSWYKAWGQGTMVTVSS

SEQ ID NO: 761 - protein, 107 aa, Artificial Sequence
  Description of Artificial Sequence: Synthetic polypeptide
  Synthetic Construct
DIQMTQSPSSVSASVGDRVTITCRASQGISSWLAWYQQKPGKAPKLLIYAASSLQSGVPSRFSGSGSGTDFTLTISSLQPEDFATYYCQQASTFPITFGGGTKVEIK

SEQ ID NO: 762 - protein, 123 aa, Artificial Sequence
  Description of Artificial Sequence: Synthetic polypeptide
  Synthetic Construct
QVQLQQWGAGLLKPSETLSLTCAVYGGSFSGYYWSWIRQPPGKGLEWIGEIDHSGSTKYNPSLKSRVTISVDTSKNQFSLKLSSVTAADTAVYYCARVGVVVGRPGYSAFDIWGQGTMVTVSS

SEQ ID NO: 763 - protein, 107 aa, Artificial Sequence
  Description of Artificial Sequence: Synthetic polypeptide
  Synthetic Construct
DIQMTQSPSSVSASVGDRVTITCRASQGISSWLAWYQQKPGKAPKLLIYAASSLQSGVPSRFSGSGSGTDFTLTISSLQPEDFATYYCQQRNSLPLTFGGGTKVEIK

SEQ ID NO: 764 - protein, 107 aa, Artificial Sequence
  Description of Artificial Sequence: Synthetic polypeptide
  Synthetic Construct
DIQMTQSPSSLSASVGDRVTITCRASQSISSYLNWYQQKPGKAPKLLIYAASSLQSGVPSRFSGSGSGTDFTLTISSLQPEDFATYYCQQSYDFPITFGGGTKVEIK

SEQ ID NO: 765 - protein, 124 aa, Artificial Sequence
  Description of Artificial Sequence: Synthetic polypeptide
  Synthetic Construct
QVQLVESGGGVVQPGRSLRLSCAASGFTFSSYGMHWVRQAPGKGLEWVAVIWYDGSNKYYADSVKGRFTISRDNSKNTLYLQMNSLRAEDTAVYYCAKDLGGYYGGAAYGMDVWGQGTTVTVSS

SEQ ID NO: 766 - protein, 108 aa, Artificial Sequence
  Description of Artificial Sequence: Synthetic polypeptide
  Synthetic Construct
DIQLTQSPSSVSASVGDRVTITCRASQDISSWLAWYQQKPGKAPKLLIYAASSLQSGVPSRFSGSGSGTDFTLTISSLQPEDFATYYCQQEVDYPPLTFGGGTKVEIK

SEQ ID NO: 767 - protein, 122 aa, Artificial Sequence
  Description of Artificial Sequence: Synthetic polypeptide
  Synthetic Construct
QVQLVESGGGVVQPGRSLRLSCAASGFTFSSYGMHWVRQAPGKGLEWVAVISYDGSNKYYADSVKGRFTISRDNSKNTLYLQMNSLRAEDTAVYYCAKDGVYYGLGNWFDPWGQGTLVTVSS

SEQ ID NO: 768 - protein, 107 aa, Artificial Sequence
  Description of Artificial Sequence: Synthetic polypeptide
  Synthetic Construct
DIQMTQSPSTLSASVGDRVTITCRASQSISSWLAWYQQKPGKAPKLLIYKASSLESGVPSRFSGSGSGTEFTLTISSLQPDDFATYYCQQLNSYSPTFGGGTKVEIK

SEQ ID NO: 769 - protein, 119 aa, Artificial Sequence
  Description of Artificial Sequence: Synthetic polypeptide
  Synthetic Construct
QVQLQESGPGLVKPSETLSLTCTVSGGSISSYYWSWIRQPPGKGLEWIGSIYYSGSTNYNPSLKSRVTISVDTSKNQFSLKLSSVTAADTAVYYCARHGWDRVGWFDPWGQGTLVTVSS

SEQ ID NO: 770 - protein, 107 aa, Artificial Sequence
  Description of Artificial Sequence: Synthetic polypeptide
  Synthetic Construct
EIVLTQSPATLSLSPGERATLSCRASQSVSRYLAWYQQKPGQAPRLLIYDASNRATGIPARFSGSGSGTDFTLTISSLEPEDFAVYYCQQYIFWPPTFGGGTKVEIK

SEQ ID NO: 771 - protein, 110 aa, Artificial Sequence; identical to SEQ ID NO: 207
  Description of Artificial Sequence: Synthetic polypeptide
  Synthetic Construct

SEQ ID NO: 772 - protein, 9 aa, Artificial Sequence
  Description of Artificial Sequence: Synthetic peptide
  Synthetic Construct
YTFTSYYIH

SEQ ID NO: 773 - protein, 17 aa, Artificial Sequence
  Description of Artificial Sequence: Synthetic peptide
  Synthetic Construct
IINPSGGSTSYAQKFQG

SEQ ID NO: 774 - protein, 16 aa, Artificial Sequence
  Description of Artificial Sequence: Synthetic peptide
  Synthetic Construct
AREADDSSGYPLGLDV

SEQ ID NO: 775 - protein, 11 aa, Artificial Sequence
  Description of Artificial Sequence: Synthetic peptide
  Synthetic Construct
RASQSVSSNLA

SEQ ID NO: 776 - protein, 7 aa, Artificial Sequence
  Description of Artificial Sequence: Synthetic peptide
  Synthetic Construct
GASTRAT

SEQ ID NO: 777 - protein, 9 aa, Artificial Sequence
  Description of Artificial Sequence: Synthetic peptide
  Synthetic Construct
QQVNSLPPT

SEQ ID NO: 778 - protein, 9 aa, Artificial Sequence
  Description of Artificial Sequence: Synthetic peptide
  Synthetic Construct
YSFTTYWIG

SEQ ID NO: 779 - protein, 17 aa, Artificial Sequence
  Description of Artificial Sequence: Synthetic peptide
  Synthetic Construct
IIYPGDSDTRYSPSFQG

SEQ ID NO: 780 - protein, 15 aa, Artificial Sequence
  Description of Artificial Sequence: Synthetic peptide
  Synthetic Construct
ARAGHYDGGHLGMDV

SEQ ID NO: 781 - protein, 12 aa, Artificial Sequence
  Description of Artificial Sequence: Synthetic peptide
  Synthetic Construct
RASQSVSSSYLA

SEQ ID NO: 782 - protein, 7 aa, Artificial Sequence
  Description of Artificial Sequence: Synthetic peptide
  Synthetic Construct
GASNRAT

SEQ ID NO: 783 - protein, 9 aa, Artificial Sequence
  Description of Artificial Sequence: Synthetic peptide
  Synthetic Construct
QQDDSAPYT

SEQ ID NO: 784 - protein, 122 aa, Artificial Sequence; identical to SEQ ID NO: 636
  Description of Artificial Sequence: Synthetic polypeptide
  Synthetic Construct

SEQ ID NO: 785 - protein, 108 aa, Artificial Sequence
  Description of Artificial Sequence: Synthetic polypeptide
  Synthetic Construct
EIVMTQSPGTLSLSPGERATLSCRASQSVSSSYLAWYQQKPGQAPRLLIYGASNRATGIPDRFSGSGSGTDFTLTISRLEPEDFAVYYCQQDDSAPYTFGGGTKVEIK

SEQ ID NO: 786 - protein, 123 aa, Artificial Sequence
  Description of Artificial Sequence: Synthetic polypeptide
  Synthetic Construct
QVQLVQSGAEVKKPGASVKVSCKASGYTFTSYYIHWVRQAPGQGLEWMGIINPSGGSTSYAQKFQGRVTMTRDTSTSTVYMELSSLRSEDTAVYYCAREADDSSGYPLGLDVWGQGTMVTVSS

SEQ ID NO: 787 - protein, 107 aa, Artificial Sequence
  Description of Artificial Sequence: Synthetic polypeptide
  Synthetic Construct
EIVMTQSPATLSVSPGERATLSCRASQSVSSNLAWYQQKPGQAPRLLIYGASTRATGIPARFSGSGSGTEFTLTISSLQSEDFAVYYCQQVNSLPPTFGGGTKVEIK

SEQ ID NO: 788 - protein, 17 aa, Artificial Sequence
  Description of Artificial Sequence: Synthetic peptide
  Synthetic Construct
LQVTDSGLYRCVIYHPP

SEQ ID NO: 789 - protein, 21 aa, Artificial Sequence
  Description of Artificial Sequence: Synthetic peptide
  Synthetic Construct
MEVGWYRSPFSRVVHLYRNGK

SEQ ID NO: 790 - DNA, 21 bp, Artificial Sequence
  Description of Artificial Sequence: Synthetic oligonucleotide
  Synthetic Construct
ctccactcacggcaaattcaa

SEQ ID NO: 791 - DNA, 22 bp, Artificial Sequence
  Description of Artificial Sequence: Synthetic oligonucleotide
  Synthetic Construct
gatgacaagcttcccattctcg

SEQ ID NO: 792 - DNA, 21 bp, Artificial Sequence
  Description of Artificial Sequence: Synthetic oligonucleotide
  Synthetic Construct
ccgtcagccgatttgctatct

SEQ ID NO: 793 - DNA, 22 bp, Artificial Sequence
  Description of Artificial Sequence: Synthetic oligonucleotide
  Synthetic Construct
acggcagagaggaggttgactt

SEQ ID NO: 794 - DNA, 22 bp, Artificial Sequence
  Description of Artificial Sequence: Synthetic oligonucleotide
  Synthetic Construct
acaacaaaaaagcctcgtgctg

SEQ ID NO: 795 - DNA, 22 bp, Artificial Sequence
  Description of Artificial Sequence: Synthetic oligonucleotide
  Synthetic Construct
ccattgaggtggagagctttca

SEQ ID NO: 796 - DNA, 22 bp, Artificial Sequence
  Description of Artificial Sequence: Synthetic oligonucleotide
  Synthetic Construct
ggcaaacccaaggtctacgttc

SEQ ID NO: 797 - DNA, 21 bp, Artificial Sequence
  Description of Artificial Sequence: Synthetic oligonucleotide
  Synthetic Construct
tacctcattggccagctgctt

SEQ ID NO: 798 - DNA, 20 bp, Artificial Sequence
  Description of Artificial Sequence: Synthetic oligonucleotide
  Synthetic Construct
aggacctgggttggaagtgg

SEQ ID NO: 799 - DNA, 20 bp, Artificial Sequence
  Description of Artificial Sequence: Synthetic oligonucleotide
  Synthetic Construct
agttggcatggtagcccttg

SEQ ID NO: 800 - protein, 132 aa, Homo sapiens
MEPLRLLILLFVTELSGAHNTTVFQGVAGQSLQVSCPYDSMKHWGRRKAWCRQLGEKGPCQRVVSTHNLWLLSFLRRWNGSTAITDDTLGGTLTITLRNLQPHDAGLYQCQSLHGSEADTLRKVLVEVLADP

SEQ ID NO: 801 - protein, 126 aa, Homo sapiens
LHPLLLLLLLFPGSQAQSKAQVLQSVAGQTLTVRCQYPPTGSLYEKKGWCKEASALVCIRLVTSSKPRTMAWTSRFTIWDDPDAGFFTVTMTDLREEDSGHYWCRIYRPSDNSVSKSVRFYLVVSP

SEQ ID NO: 802 - protein, 105 aa, Homo sapiens
LLWMLFVSELRAATKLTEEKYELKEGQTLDVKCDYTLEKFASSQKAWQIIRDGEMPKTLACTERPSKNSHPVQVGRIILEDYHDHGLLRVRMVNLQVEDSGLYQC

SEQ ID NO: 803 - protein, 118 aa, Homo sapiens
ELRAATKLTGEKYELKEGQTLDVKCDYTLEKFASSQKAWQIIRDGEMPKTLACTERPSKNSHPVQVGRIILEDYHDHGLLRVRMVNLQVEDSGLYQCVIYQPPKEPHMLFDRIRLVVT

SEQ ID NO: 804 - protein, 121 aa, Homo sapiens
VTELSGAHNTTVFQGVAGQSLQVSCPYDSMKHWGRRKAWCRQLGEKGPCQRVVSTHNLWLLSFLRRWNGSTAITDDTLGGTLTITLRNLQPHDAGLYQCQSLHGSEADTLRKVLVEVLADP

SEQ ID NO: 805 - protein, 120 aa, Mus musculus
EVKAAIVLEEERYDLVEGQTLTVKCPFNIMKYANSQKAWQRLPDGKEPLTLVVTQRPFTRPSEVHMGKFTLKHDPSEAMLQVQMTDLQVTDSGLYRCVIYHPPNDPVVLFHPVRLVVTKG

SEQ ID NO: 806 - protein, 121 aa, Mus musculus
ITALSQALNTTVLQGMAGQSLRVSCTYDALKHWGRRKAWCRQLGEEGPCQRVVSTHGVWAAGLPEEADGSTVIADDTLAGTVTITLKNLQAGDAGLYQCQSLRGREREVLQKVLVEVLEDP

SEQ ID NO: 807 - protein, 121 aa, Mus musculus
LCVSGLQAGDEEEHKCFLEGENLTLTCPYNIMLYSLSLKAWQRVRSHGSPETLVLTNTRKADFNVARAGKYLLEDYPTESVVKVTVTGLQRQDVGLYQCVVYLSPDNVIILRQRIRLAWCQ

SEQ ID NO: 808 - protein, 112 aa, Homo sapiens
SQAQSKAQVLQSVAGQTLTVRCQYPPTGSLYEKKGWCKEASALVCIRLVTSSKPRTMAWTSRFTIWDDPDAGFFTVTMTDLREEDSGHYWCRIYRPSDNSVSKSVRFYLVVS

SEQ ID NO: 809 - protein, 109 aa, Homo sapiens
EVEQNSGPLSVPEGAIASLNCTYSDRGSQSFFWYRQYSGKSPELIMSIYSNGDKEDGRFTAQLNKASQYVSLLIRDSQPSDSATYLCAVTTDSWGKLQFGAGTQVVVTP

SEQ ID NO: 810 - protein, 114 aa, Homo sapiens
GVTQTPKFQVLKTGQSMTLQCAQDMNHEYMSWYRQDPGMGLRLIHYSVGAGITDQGEVPNGYNVSRSTTEDFPLRLLSAAPSQTSVYFCASRPGLAGGRPEQYFGPGTRLTVTE

SEQ ID NO: 811 - protein, 121 aa, Homo sapiens
HLEQPQISSTKTLSKTARLECVVSGITISATSVYWYRERPGEVIQFLVSISYDGTVRKESGIPSGKFEVDRIPETSTSTLTIHNVEKQDIATYYCALWEAQQELGKKIKVFGPGTKLIITD

SEQ ID NO: 812 - protein, 119 aa, Homo sapiens
AIELVPEHQTVPVSIGVPATLRCSMKGEAIGNYYINWYRKTQGNTMTFIYREKDIYGPGFKDNFQGDIDIAKNLAVLKILAPSERDEGSYYCACDTLGMGGEYTDKLIFGKGTRVTVEP

SEQ ID NO: 813 - protein, 116 aa, Homo sapiens
DKVTQSSPDQTVASGSEVVLLCTYDTVYSNPDLFWYRIRPDYSFQFVFYGDDSRSEGADFTQGRFSVKHILTQKAFHLVISPVRTEDSATYYCAFTLPPPTDKLIFGKGTRVTVEP

SEQ ID NO: 814 - protein, 115 aa, Mus musculus
QLQQSGAELMKPGASVKISCKASGYTFSDYWIEWVKQRPGHGLEWIGEILPGSGSTNYHERFKGKATFTADTSSSTAYMQLNSLTSEDSGVYYCLHGNYDFDGWGQGTTLTVSSA

SEQ ID NO: 815 - protein, 103 aa, Mus musculus
VLTQSPAIMSASPGEKVTMTCSASSSVNYMYWYQQKSGTPKRWIYDTSKLASGVPVRFSGSGSGTSYSLTISSMETEDAATYYCQQWGRNPTFGGGTKLEIKR

SEQ ID NO: 816 - protein, 113 aa, Homo sapiens
QFRVSPLDRTWNLGETVELKCQVLLSNPTSGCSWLFQPRGAAASPTFLLYLSQNKPKAAEGLDTQRFSGKRLGDTFVLTLSDFRRENEGYYFCSALSNSIMYFSHFVPVFLPA

SEQ ID NO: 817 - protein, 115 aa, Homo sapiens
HVAQPAVVLASSRGIASFVCEYASPGKATEVRVTVLRQADSQVTEVCAATYMMGNELTFLDDSICTGTSSGNQVNLTIQGLRAMDTGLYICKVELMYPPPYYLGIGNGTQIYVID

SEQ ID NO: 818 - protein, 9 aa, Artificial Sequence
  Description of Artificial Sequence: Synthetic peptide
  Synthetic Construct
AWCRQLGEK

SEQ ID NO: 819 - protein, 7 aa, Artificial Sequence
  Description of Artificial Sequence: Synthetic peptide
  Synthetic Construct
HWGRRAW

SEQ ID NO: 820 - protein, 132 aa, Artificial Sequence
  Description of Artificial Sequence: Synthetic polypeptide
  Consensus Sequence
  MOD_RES (1)..(2): Any Amino Acid
  MOD_RES (5)..(5): Any naturally occurring amino acid
  MOD_RES (8)..(8): Any naturally occurring amino acid
  MOD_RES (12)..(22): Any naturally occurring amino acid
  MOD_RES (24)..(24): Any naturally occurring amino acid
  MOD_RES (26)..(26): Any naturally occurring amino acid
  MOD_RES (31)..(31): Any naturally occurring amino acid
  MOD_RES (33)..(33): Any naturally occurring amino acid
  MOD_RES (35)..(35): Any naturally occurring amino acid
  MOD_RES (37)..(37): Any naturally occurring amino acid
  MOD_RES (39)..(47): Any naturally occurring amino acid
  MOD_RES (49)..(49): Any naturally occurring amino acid
  MOD_RES (52)..(59): Any naturally occurring amino acid
  MOD_RES (61)..(61): Any naturally occurring amino acid
  MOD_RES (63)..(63): Any naturally occurring amino acid
  MOD_RES (65)..(77): Any naturally occurring amino acid
  MOD_RES (79)..(83): Any naturally occurring amino acid
  MOD_RES (85)..(85): Any Amino Acid
  MOD_RES (88)..(88): Any Amino Acid
  MOD_RES (89)..(90): Any naturally occurring amino acid
  MOD_RES (92)..(93): Any naturally occurring amino acid
  MOD_RES (95)..(95): Any naturally occurring amino acid
  MOD_RES (97)..(99): Any naturally occurring amino acid
  MOD_RES (101)..(103): Any naturally occurring amino acid
  MOD_RES (105)..(105): Any naturally occurring amino acid
  MOD_RES (107)..(107): Any naturally occurring amino acid
  MOD_RES (109)..(109): Any naturally occurring amino acid
  MOD_RES (111)..(115): Any naturally occurring amino acid
  MOD_RES (117)..(123): Any naturally occurring amino acid
  MOD_RES (125)..(131): Any naturally occurring amino acid
XXPLXLLXLLFXXXXXXXXXXXVXQXVAGQXLXVXCXYXXXXXXXXXKXWCXXXXXXXXCXRXVXXXXXXXXXXXXXWXXXXXIXDDXXXGXXTXTXXXLXXXDXGXYXCXXXXXSXXXXXXXVXXXXXXXP

SEQ ID NO: 821 - protein, 107 aa, Artificial Sequence
  Description of Artificial Sequence: Synthetic polypeptide
  Consensus Sequence
  MOD_RES (3)..(4): Any Amino Acid
  MOD_RES (8)..(8): Any naturally occurring amino acid
  MOD_RES (11)..(12): Any naturally occurring amino acid
  MOD_RES (14)..(16): Any naturally occurring amino acid
  MOD_RES (18)..(25): Any naturally occurring amino acid
  MOD_RES (28)..(28): Any naturally occurring amino acid
  MOD_RES (30)..(30): Any naturally occurring amino acid
  MOD_RES (32)..(32): Any naturally occurring amino acid
  MOD_RES (34)..(34): Any naturally occurring amino acid
  MOD_RES (36)..(38): Any naturally occurring amino acid
  MOD_RES (40)..(44): Any naturally occurring amino acid
  MOD_RES (48)..(49): Any Amino Acid or absent
  MOD_RES (51)..(52): Any Amino Acid
  MOD_RES (53)..(54): Any naturally occurring amino acid
  MOD_RES (56)..(76): Any naturally occurring amino acid
  MOD_RES (78)..(81): Any naturally occurring amino acid
  MOD_RES (82)..(82): Any Amino Acid
  MOD_RES (84)..(84): Any Amino Acid
  MOD_RES (85)..(87): Any naturally occurring amino acid
  MOD_RES (89)..(89): Any naturally occurring amino acid
  MOD_RES (91)..(95): Any naturally occurring amino acid
  MOD_RES (99)..(100): Any naturally occurring amino acid
  MOD_RES (102)..(102): Any naturally occurring amino acid
LLXXLFVXELXXAXXXTXXXXXXXXGQXLXVXCXYXXXKXXXXXKAWXXQXXXXGXXXXXXXXXXXXXXXXXXXXXGXXXXXDXXXXGXLXXXXXNLQXXDXGLYQC

SEQ ID NO: 822 - protein, 227 aa, Mus musculus
MGPLHQFLLLLITALSQALNTTVLQGMAGQSLRVSCTYDALKHWGRRKAWCRQLGEEGPCQRVVSTHGVWLLAFLKKRNGSTVIADDTLAGTVTITLKNLQAGDAGLYQCQSLRGREAEVLQKVLVEVLEDPLDDQDAGDLWVPEESSSFEGAQVEHSTSRNQETSFPPTSILLLLACVLLSKFLAASILWAVARGRQKPGTPVVRGLDCGQDAGHQLQILTGPGGT

SEQ ID NO: 823 - protein, 228 aa, Rattus norvegicus
MEPLHVFVLLLVTELSQALNTTVLQGVAGQSLRVSCTYDALRHWGRRKAWCRQLAEEGPCQRVVSTHGVWLLAFLRKQNGSTVITDDTLAGTVTITLRNLQAGDAGLYQCQSLRGREAEVLQKVVVEVLEDPLDDQDAGDLWVPEESESFEGAQVEHSTSSQVSSCGSPLTYHLPPKEPIRKDLLPTHFHSSPPGLCPPEQASYSQHPLGCGQGQAEAGDTCGQWARL

SEQ ID NO: 824 - protein, 260 aa, Macaca mulatta
MPDPLFSAVQGKDKILHKALCICPWPGKGGMEPLRLLILLFATELSGAHNTTVFQGVEGQSLQVSCPYDSMKHWGRRKAWCRQLGEKGPCQRVVSTHNLWLLSFLRRRNGSTAITDDTLGGTLTITLRNLQPHDAGFYQCQSLHGSEADTLRKVLVEVLADPLDHRDAGDLWVPGESESFEDAHVEHSISRSLLEGEIPFPPTSVLLLLACIFLIKILAASALWAAAWHGQKPGTHPPSEPDCGHDPGHQLQTLPGLRDT

SEQ ID NO: 825 - protein, 230 aa, Bos taurus
MEPVVLLILLAVTELSRAHNTTVFQGMMGRSLRVSCPYNSLKHWGRRKAWCRQLGEEGLCQQVVSTHPSWLLSFLKRRNGSTAITDDALGGTLTITLRNLQTHDAGLYQCQSLHGSEADTLRKVLVEVLADPRDYQDPGDLWIPEGSESFENAQVEHSISRSLSEEESPFPPTSILFLLACIFLSKLLAASALWAAAWHGQKQRPPQASGPDCGHNPGYQLQTLTELRDV

SEQ ID NO: 826 - protein, 230 aa, Equus caballus
MEPLPLLILLSVAELSRGHNTTVFQGTAGRSLKVSCPYNSLMHWGRRKAWCRQLGEDGPCQQVVSTHSLWLLSFLKRRNGSTVITDDALGGILTITLRNLQAHDAGFYQCQSLHGGEADTLRKVLVEVLADPLDHQEPGDLWIPKESESFEDAQVEHSISRSLVEEEIPSLPTSILLLLACIFLSKLLAASAIWAAAWHGQKQETPPASEPDRGHDPGYQLHTLTGERDT

SEQ ID NO: 827 - protein, 233 aa, Sus domesticus
METLGLLLLLWVAELSRAHNTSVFQGTAGQSLRVSCSYNSLKHWGRRKAWCRQLSEEGLCQHVVSTHPTWLLSFLKRRNGSTAITDDALGGTLTITLRNLQAHDAGLYQCQSLHGSEADTLKKVLVEVLADPLESQSKSFQDVQMEHSISRNLSEESLFPPTSTLFLLACVFLSKLLVASALWAAAWHGHKQRTSPAGGLDCGRDPGDQDQTLTDELGESSDQDQTLTELRDT

SEQ ID NO: 828 - protein, 230 aa, Canis familiaris
MEPLWLLILLAVTELSGAHNTTVFQGMAGRSLQVSCPYNSLKHWGRRKAWCRQVDKEGPCQRVVSTHRSWLLSFLKRWNGSTAIVDDALGGTLTITLRNLQAHDAGLYQCQSLYGDEADTLRKVLVEVLADPLDHLDPGDLWIPEESKGFEDAHVEPSVSRSLSEEEIPFPPTSILFLLACIFLSKFLAASALWAAAWRGQKLGTPQASELDCSCDPGYQLQTLTEPRDM

SEQ ID NO: 829 - protein, 11 aa, Artificial Sequence
  Description of Artificial Sequence: Synthetic peptide
  Synthetic Construct
RASENIYSFLA

SEQ ID NO: 830 - protein, 17 aa, Artificial Sequence
  Description of Artificial Sequence: Synthetic peptide
  Synthetic Construct
KSSQSLLYSSNQKNCLA

SEQ ID NO: 831 - protein, 16 aa, Artificial Sequence
  Description of Artificial Sequence: Synthetic peptide
  Synthetic Construct
KSSQSLLYSNGKTFLS

SEQ ID NO: 832 - protein, 16 aa, Artificial Sequence
  Description of Artificial Sequence: Synthetic peptide
  Synthetic Construct
KSSQSLLDSDGKTYLN

SEQ ID NO: 833 - protein, 10 aa, Artificial Sequence
  Description of Artificial Sequence: Synthetic peptide
  Synthetic Construct
SASSSVSYMY

SEQ ID NO: 834 - protein, 16 aa, Artificial Sequence
  Description of Artificial Sequence: Synthetic peptide
  Synthetic Construct
RSSQSLVHSNGNTYLH

SEQ ID NO: 835 - protein, 16 aa, Artificial Sequence
  Description of Artificial Sequence: Synthetic peptide
  Synthetic Construct
RSSQTIIHSNGNTYLE

SEQ ID NO: 836 - protein, 17 aa, Artificial Sequence
  Description of Artificial Sequence: Synthetic peptide
  Synthetic Construct
KSSQSLLYSSDQKNYLA

SEQ ID NO: 837 - protein, 11 aa, Artificial Sequence
  Description of Artificial Sequence: Synthetic peptide
  Synthetic Construct
RASENIYSYLA

SEQ ID NO: 838 - protein, 11 aa, Artificial Sequence
  Description of Artificial Sequence: Synthetic peptide
  Synthetic Construct
RTSENVYSNLA

SEQ ID NO: 839 - protein, 16 aa, Artificial Sequence
  Description of Artificial Sequence: Synthetic peptide
  Synthetic Construct
RSSQSLVHSNGYTYLH

SEQ ID NO: 840 - protein, 16 aa, Artificial Sequence
  Description of Artificial Sequence: Synthetic peptide
  Synthetic Construct
RFSQSLVHSNGNTYLH

SEQ ID NO: 841 - protein, 10 aa, Artificial Sequence
  Description of Artificial Sequence: Synthetic peptide
  Synthetic Construct
KASSNVNYMS

SEQ ID NO: 842 - protein, 17 aa, Artificial Sequence
  Description of Artificial Sequence: Synthetic peptide
  Synthetic Construct
KSSQSLLNSGNQKKYLT

SEQ ID NO: 843 - protein, 17 aa, Artificial Sequence
  Description of Artificial Sequence: Synthetic peptide
  Synthetic Construct
KSSQSLLYSGNQKNFLA

SEQ ID NO: 844 - protein, 7 aa, Artificial Sequence
  Description of Artificial Sequence: Synthetic peptide
  Synthetic Construct
NSKTFAE

SEQ ID NO: 845 - protein, 7 aa, Artificial Sequence
  Description of Artificial Sequence: Synthetic peptide
  Synthetic Construct
WAFTRES

SEQ ID NO: 846 - protein, 7 aa, Artificial Sequence
  Description of Artificial Sequence: Synthetic peptide
  Synthetic Construct
LVSKLDS

SEQ ID NO: 847 - protein, 7 aa, Artificial Sequence
  Description of Artificial Sequence: Synthetic peptide
  Synthetic Construct
LTSILAS

SEQ ID NO: 848 - protein, 7 aa, Artificial Sequence
  Description of Artificial Sequence: Synthetic peptide
  Synthetic Construct
KVSNRFS

SEQ ID NO: 849 - protein, 7 aa, Artificial Sequence
  Description of Artificial Sequence: Synthetic peptide
  Synthetic Construct
WASTRES

SEQ ID NO: 850 - protein, 7 aa, Artificial Sequence
  Description of Artificial Sequence: Synthetic peptide
  Synthetic Construct
KAKTLAE

SEQ ID NO: 851 - protein, 7 aa, Artificial Sequence
  Description of Artificial Sequence: Synthetic peptide
  Synthetic Construct
AATNLAD

SEQ ID NO: 852 - protein, 7 aa, Artificial Sequence
  Description of Artificial Sequence: Synthetic peptide
  Synthetic Construct
FTSNLPS

SEQ ID NO: 853 - protein, 7 aa, Artificial Sequence
  Description of Artificial Sequence: Synthetic peptide
  Synthetic Construct
KVSNRFC

SEQ ID NO: 854 - protein, 10 aa, Artificial Sequence
  Description of Artificial Sequence: Synthetic peptide
  Synthetic Construct
QHHYGTPPWT

SEQ ID NO: 855 - protein, 9 aa, Artificial Sequence
  Description of Artificial Sequence: Synthetic peptide
  Synthetic Construct
QQYYSYPLT

SEQ ID NO: 856 - protein, 9 aa, Artificial Sequence
  Description of Artificial Sequence: Synthetic peptide
  Synthetic Construct
MQGTHFPLT

SEQ ID NO: 857 - protein, 9 aa, Artificial Sequence
  Description of Artificial Sequence: Synthetic peptide
  Synthetic Construct
WQGTHFPYT

SEQ ID NO: 858 - protein, 9 aa, Artificial Sequence
  Description of Artificial Sequence: Synthetic peptide
  Synthetic Construct
QQWSFNPYT

SEQ ID NO: 859 - protein, 9 aa, Artificial Sequence
  Description of Artificial Sequence: Synthetic peptide
  Synthetic Construct
SQSTHVPLT

SEQ ID NO: 860 - protein, 9 aa, Artificial Sequence
  Description of Artificial Sequence: Synthetic peptide
  Synthetic Construct
FQGSHVPYT

SEQ ID NO: 861 - protein, 9 aa, Artificial Sequence
  Description of Artificial Sequence: Synthetic peptide
  Synthetic Construct
QHHYGTPFT

SEQ ID NO: 862 - protein, 9 aa, Artificial Sequence
  Description of Artificial Sequence: Synthetic peptide
  Synthetic Construct
HHFWGTPYT

SEQ ID NO: 863 - protein, 9 aa, Artificial Sequence
  Description of Artificial Sequence: Synthetic peptide
  Synthetic Construct
SQSTRVPYT

SEQ ID NO: 864 - protein, 9 aa, Artificial Sequence
  Description of Artificial Sequence: Synthetic peptide
  Synthetic Construct
SQSTRVPPT

SEQ ID NO: 865 - protein, 8 aa, Artificial Sequence
  Description of Artificial Sequence: Synthetic peptide
  Synthetic Construct
SGEVTQFT

SEQ ID NO: 866 - protein, 9 aa, Artificial Sequence
  Description of Artificial Sequence: Synthetic peptide
  Synthetic Construct
QNDYGFPLT

SEQ ID NO: 867 - protein, 9 aa, Artificial Sequence
  Description of Artificial Sequence: Synthetic peptide
  Synthetic Construct
QQYYSYPFT

SEQ ID NO: 868 - protein, 9 aa, Artificial Sequence
  Description of Artificial Sequence: Synthetic peptide
  Synthetic Construct
FTLSSYAMS

SEQ ID NO: 869 - protein, 9 aa, Artificial Sequence
  Description of Artificial Sequence: Synthetic peptide
  Synthetic Construct
YTFTEYTMH

SEQ ID NO: 870 - protein, 9 aa, Artificial Sequence
  Description of Artificial Sequence: Synthetic peptide
  Synthetic Construct
YTFTDYEMH

SEQ ID NO: 871 - protein, 9 aa, Artificial Sequence
  Description of Artificial Sequence: Synthetic peptide
  Synthetic Construct
FTFSDAWMG

SEQ ID NO: 872 - protein, 9 aa, Artificial Sequence
  Description of Artificial Sequence: Synthetic peptide
  Synthetic Construct
FSFNTYAMN

SEQ ID NO: 873 - protein, 9 aa, Artificial Sequence
  Description of Artificial Sequence: Synthetic peptide
  Synthetic Construct
YTVSRYWMH

SEQ ID NO: 874 - protein, 9 aa, Artificial Sequence
  Description of Artificial Sequence: Synthetic peptide
  Synthetic Construct
YPFSNFWIT

SEQ ID NO: 875 - protein, 9 aa, Artificial Sequence
  Description of Artificial Sequence: Synthetic peptide
  Synthetic Construct
LTSNTYTQT

SEQ ID NO: 876 - protein, 9 aa, Artificial Sequence
  Description of Artificial Sequence: Synthetic peptide
  Synthetic Construct
FTFSDAWMD

SEQ ID NO: 877 - protein, 9 aa, Artificial Sequence
  Description of Artificial Sequence: Synthetic peptide
  Synthetic Construct
FTFNTYSMN

SEQ ID NO: 878 - protein, 9 aa, Artificial Sequence
  Description of Artificial Sequence: Synthetic peptide
  Synthetic Construct
YTFTTYWIH

SEQ ID NO: 879 - protein, 9 aa, Artificial Sequence
  Description of Artificial Sequence: Synthetic peptide
  Synthetic Construct
YAFSNYWMS

SEQ ID NO: 880 - protein, 9 aa, Artificial Sequence
  Description of Artificial Sequence: Synthetic peptide
  Synthetic Construct
YAFSSSWMN

SEQ ID NO: 881 - protein, 9 aa, Artificial Sequence
  Description of Artificial Sequence: Synthetic peptide
  Synthetic Construct
YIFTTYWIH

SEQ ID NO: 882 - protein, 9 aa, Artificial Sequence
  Description of Artificial Sequence: Synthetic peptide
  Synthetic Construct
FNFNTYAMK

SEQ ID NO: 883 - protein, 9 aa, Artificial Sequence
  Description of Artificial Sequence: Synthetic peptide
  Synthetic Construct
FNFNTYAMN

SEQ ID NO: 884 - protein, 9 aa, Artificial Sequence
  Description of Artificial Sequence: Synthetic peptide
  Synthetic Construct
YTFSDYYIH

SEQ ID NO: 885 - protein, 9 aa, Artificial Sequence
  Description of Artificial Sequence: Synthetic peptide
  Synthetic Construct
FRFNTYAMT

SEQ ID NO: 886 - protein, 13 aa, Artificial Sequence
  Description of Artificial Sequence: Synthetic peptide
  Synthetic Construct
VASISRGGSTYYP

SEQ ID NO: 887 - protein, 14 aa, Artificial Sequence
  Description of Artificial Sequence: Synthetic peptide
  Synthetic Construct
IGGINPNNGGTSYS

SEQ ID NO: 888 - protein, 14 aa, Artificial Sequence
  Description of Artificial Sequence: Synthetic peptide
  Synthetic Construct
IGVIDPETGGTAYN

SEQ ID NO: 889 - protein, 16 aa, Artificial Sequence
  Description of Artificial Sequence: Synthetic peptide
  Synthetic Construct
VAEIRDKVKNHATYYA

SEQ ID NO: 890 - protein, 16 aa, Artificial Sequence
  Description of Artificial Sequence: Synthetic peptide
  Synthetic Construct
IARIRSKSNNYATYYA

SEQ ID NO: 891 - protein, 14 aa, Artificial Sequence
  Description of Artificial Sequence: Synthetic peptide
  Synthetic Construct
IGRIDPNSGGTKYN

SEQ ID NO: 892 - protein, 14 aa, Artificial Sequence
  Description of Artificial Sequence: Synthetic peptide
  Synthetic Construct
IGDIYPGSDNSNYN

SEQ ID NO: 893 - protein, 16 aa, Artificial Sequence
  Description of Artificial Sequence: Synthetic peptide
  Synthetic Construct
ESVIRSKSNNFSTLYA

SEQ ID NO: 894 - protein, 16 aa, Artificial Sequence
  Description of Artificial Sequence: Synthetic peptide
  Synthetic Construct
VAEIRNKVNNHATYYA

SEQ ID NO: 895 - protein, 16 aa, Artificial Sequence
  Description of Artificial Sequence: Synthetic peptide
  Synthetic Construct
  MOD_RES (8)..(8): Glutamic acid or Glutamine
VAHIKTKXNNFATFYA

SEQ ID NO: 896 - protein, 14 aa, Artificial Sequence
  Description of Artificial Sequence: Synthetic peptide
  Synthetic Construct
IGRNDPNSGGSNYN

SEQ ID NO: 897 - protein, 14 aa, Artificial Sequence
  Description of Artificial Sequence: Synthetic peptide
  Synthetic Construct
IGQIYPGDGDTKYN

SEQ ID NO: 898 - protein, 14 aa, Artificial Sequence
  Description of Artificial Sequence: Synthetic peptide
  Synthetic Construct
IGRIYPGDGDTNYN

SEQ ID NO: 899 - protein, 14 aa, Artificial Sequence
  Description of Artificial Sequence: Synthetic peptide
  Synthetic Construct
IGRIDPNNGDTNYN

SEQ ID NO: 900 - protein, 16 aa, Artificial Sequence
  Description of Artificial Sequence: Synthetic peptide
  Synthetic Construct
IARIRSNSNDYATNYS

SEQ ID NO: 901 - protein, 14 aa, Artificial Sequence
  Description of Artificial Sequence: Synthetic peptide
  Synthetic Construct
IGDIYPGSDNRNFN

SEQ ID NO: 902 - protein, 16 aa, Artificial Sequence
  Description of Artificial Sequence: Synthetic peptide
  Synthetic Construct
VARIRSKSNNYATYYA

SEQ ID NO: 903 - protein, 14 aa, Artificial Sequence
  Description of Artificial Sequence: Synthetic peptide
  Synthetic Construct
IGYIYPNNGDNGYN

SEQ ID NO: 904 - protein, 16 aa, Artificial Sequence
  Description of Artificial Sequence: Synthetic peptide
  Synthetic Construct
EGVIRRKSSNFATLYA

SEQ ID NO: 905 - protein, 13 aa, Artificial Sequence
  Description of Artificial Sequence: Synthetic peptide
  Synthetic Construct
TRGYGYYRTPFAN

SEQ ID NO: 906 - protein, 12 aa, Artificial Sequence
  Description of Artificial Sequence: Synthetic peptide
  Synthetic Construct
ARGGSHYYAMDY

SEQ ID NO: 907 - protein, 18 aa, Artificial Sequence
  Description of Artificial Sequence: Synthetic peptide
  Synthetic Construct
TSPDYYGSSYPLYYAMDY

SEQ ID NO: 908 - protein, 7 aa, Artificial Sequence
  Description of Artificial Sequence: Synthetic peptide
  Synthetic Construct
RLGVFDY

SEQ ID NO: 909 - protein, 13 aa, Artificial Sequence
  Description of Artificial Sequence: Synthetic peptide
  Synthetic Construct
VRHGDGNLWYIDV

SEQ ID NO: 910 - protein, 9 aa, Artificial Sequence
  Description of Artificial Sequence: Synthetic peptide
  Synthetic Construct
VLTGTDFDY

SEQ ID NO: 911 - protein, 13 aa, Artificial Sequence
  Description of Artificial Sequence: Synthetic peptide
  Synthetic Construct
AREAYYTNPGFAY

SEQ ID NO: 912 - protein, 12 aa, Artificial Sequence
  Description of Artificial Sequence: Synthetic peptide
  Synthetic Construct
VRHKSNRYPGVY

SEQ ID NO: 913 - protein, 13 aa, Artificial Sequence
  Description of Artificial Sequence: Synthetic peptide
  Synthetic Construct
TSLYDGYYLRFAY

SEQ ID NO: 914 - protein, 12 aa, Artificial Sequence
  Description of Artificial Sequence: Synthetic peptide
  Synthetic Construct
  MOD_RES (2)..(2): Glutamic acid or Glutamine
  MOD_RES (4)..(4): Glutamic acid or Glutamine
VXHXSNNYPFAY

SEQ ID NO: 915 - protein, 9 aa, Artificial Sequence
  Description of Artificial Sequence: Synthetic peptide
  Synthetic Construct
VRTNWDGDF

SEQ ID NO: 916 - protein, 19 aa, Artificial Sequence
  Description of Artificial Sequence: Synthetic peptide
  Synthetic Construct
SREKGADYYGSTYSAWFSY

SEQ ID NO: 917 - protein, 16 aa, Artificial Sequence
  Description of Artificial Sequence: Synthetic peptide
  Synthetic Construct
ARLLRNQPGESYAMDY

SEQ ID NO: 918 - protein, 9 aa, Artificial Sequence
  Description of Artificial Sequence: Synthetic peptide
  Synthetic Construct
VMTGTDFDY

SEQ ID NO: 919 - protein, 12 aa, Artificial Sequence
  Description of Artificial Sequence: Synthetic peptide
  Synthetic Construct
VGHKINNYPFAH

SEQ ID NO: 920 - protein, 13 aa, Artificial Sequence
  Description of Artificial Sequence: Synthetic peptide
  Synthetic Construct
VRHYSNYGWGFAY

SEQ ID NO: 921 - protein, 12 aa, Artificial Sequence
  Description of Artificial Sequence: Synthetic peptide
  Synthetic Construct
ARRGYYGGSYDY

SEQ ID NO: 922 - protein, 12 aa, Artificial Sequence
  Description of Artificial Sequence: Synthetic peptide
  Synthetic Construct
VRHKSNKYPFVY

SEQ ID NO: 923 - protein, 23 aa, Artificial Sequence
  Description of Artificial Sequence: Synthetic peptide
  Synthetic Construct
  MOD_RES (3)..(3): Glutamic acid or Glutamine
DIXVTQSPASLSASVGETVTITC

SEQ ID NO: 924 - protein, 21 aa, Artificial Sequence
  Description of Artificial Sequence: Synthetic peptide
  Synthetic Construct
TMSQSPSSLAVSVGEKVTMSC

SEQ ID NO: 925 - protein, 23 aa, Artificial Sequence
  Description of Artificial Sequence: Synthetic peptide
  Synthetic Construct
  MOD_RES (3)..(3): Glutamic acid or Glutamine
DVXMTQTPLTLSVTIGQPASISC

SEQ ID NO: 926 - protein, 21 aa, Artificial Sequence
  Description of Artificial Sequence: Synthetic peptide
  Synthetic Construct
VLTQSPALMSASPGEKVTMTC

SEQ ID NO: 927 - protein, 23 aa, Artificial Sequence
  Description of Artificial Sequence: Synthetic peptide
  Synthetic Construct
  MOD_RES (3)..(3): Glutamic acid or Glutamine
DVXMTQTPLSLPVSLGDQASISC

SEQ ID NO: 928 - protein, 21 aa, Artificial Sequence
  Description of Artificial Sequence: Synthetic peptide
  Synthetic Construct
  MOD_RES (10)..(10): Glutamic acid or Glutamine
VLTQSPAIMXASPGEKVTMTC

SEQ ID NO: 929 - protein, 22 aa, Artificial Sequence
  Description of Artificial Sequence: Synthetic peptide
  Synthetic Construct
NVLTQSPALMSASPGEKVTMTC

SEQ ID NO: 930 - protein, 23 aa, Artificial Sequence
  Description of Artificial Sequence: Synthetic peptide
  Synthetic Construct
DVVMTQTPLSLPVSLGDQASISC

SEQ ID NO: 931 - protein, 23 aa, Artificial Sequence
  Description of Artificial Sequence: Synthetic peptide
  Synthetic Construct
DVVMTQTPLTLSVTIGQPASISC

SEQ ID NO: 932 - protein, 22 aa, Artificial Sequence
  Description of Artificial Sequence: Synthetic peptide
  Synthetic Construct
ITMSQSPSSLAVSVGEKVTMSC

SEQ ID NO: 933 - protein, 21 aa, Artificial Sequence
  Description of Artificial Sequence: Synthetic peptide
  Synthetic Construct
  MOD_RES (10)..(10): Glutamic acid or Glutamine
  MOD_RES (12)..(12): Glutamic acid or Glutamine
QMSQSPACLXAXVGESVTITC

SEQ ID NO: 934 - protein, 23 aa, Artificial Sequence
  Description of Artificial Sequence: Synthetic peptide
  Synthetic Construct
DIQMTQSPASLSVSVGETVTITC

SEQ ID NO: 935 - protein, 23 aa, Artificial Sequence
  Description of Artificial Sequence: Synthetic peptide
  Synthetic Construct
  MOD_RES (3)..(3): Glutamic acid or Glutamine
DVXMTQNPLSLPVSLGDQASISC

SEQ ID NO: 936 - protein, 23 aa, Artificial Sequence
  Description of Artificial Sequence: Synthetic peptide
  Synthetic Construct
DVLMTQTPLSLPVSLGDQASISC

SEQ ID NO: 937 - protein, 22 aa, Artificial Sequence
  Description of Artificial Sequence: Synthetic peptide
  Synthetic Construct
  MOD_RES (13)..(13): Glutamic acid or Glutamine
NVLTQSPALIWAXPGEKVTMTC

SEQ ID NO: 938 - protein, 23 aa, Artificial Sequence
  Description of Artificial Sequence: Synthetic peptide
  Synthetic Construct
  MOD_RES (3)..(3): Glutamic acid or Glutamine
DIXMTQSPSSLTVTAGEKVTMSC

SEQ ID NO: 939 - protein, 19 aa, Artificial Sequence
  Description of Artificial Sequence: Synthetic peptide
  Synthetic Construct
TQSPSSLAVSVGEKVTMTC

SEQ ID NO: 940 - protein, 15 aa, Artificial Sequence
  Description of Artificial Sequence: Synthetic peptide
  Synthetic Construct
WYQLKQGKSPQLLVY

SEQ ID NO: 941 - protein, 15 aa, Artificial Sequence
  Description of Artificial Sequence: Synthetic peptide
  Synthetic Construct
WYQQKPGQSPKLLIY

SEQ ID NO: 942 - protein, 15 aa, Artificial Sequence
  Description of Artificial Sequence: Synthetic peptide
  Synthetic Construct
WLLQRPGQSPKRLIY

SEQ ID NO: 943 - protein, 15 aa, Artificial Sequence
  Description of Artificial Sequence: Synthetic peptide
  Synthetic Construct
WYQQKPRSSPKPWIY

SEQ ID NO: 944 - protein, 15 aa, Artificial Sequence
  Description of Artificial Sequence: Synthetic peptide
  Synthetic Construct
WYLQKPGQSPKLLIY

SEQ ID NO: 945 - protein, 15 aa, Artificial Sequence
  Description of Artificial Sequence: Synthetic peptide
  Synthetic Construct
WYLRKPGQSPKLLIY

SEQ ID NO: 946 - protein, 15 aa, Artificial Sequence
  Description of Artificial Sequence: Synthetic peptide
  Synthetic Construct
WYQQKQGKSPKLVVY

SEQ ID NO: 947 - protein, 15 aa, Artificial Sequence
  Description of Artificial Sequence: Synthetic peptide
  Synthetic Construct
WYQQKQGKSPQLLVY

SEQ ID NO: 948 - protein, 15 aa, Artificial Sequence
  Description of Artificial Sequence: Synthetic peptide
  Synthetic Construct
  MOD_RES (2)..(3): Any Amino Acid
  MOD_RES (4)..(4): Any naturally occurring amino acid
WXXXKPRSSPKPGIY

SEQ ID NO: 949 - protein, 15 aa, Artificial Sequence
  Description of Artificial Sequence: Synthetic peptide
  Synthetic Construct
  MOD_RES (10)..(10): Glutamic acid or Glutamine
WYQQKPGQPXKLLIY

SEQ ID NO: 950 - protein, 32 aa, Artificial Sequence
  Description of Artificial Sequence: Synthetic polypeptide
  Synthetic Construct
GVPSRFSGSGSGTQFSLRINSLQPEDFGSYYC

SEQ ID NO: 951 - protein, 32 aa, Artificial Sequence
  Description of Artificial Sequence: Synthetic polypeptide
  Synthetic Construct
GVPDRFTGSGSGTDFTLTISSVKAEDLAVYYC

SEQ ID NO: 952 - protein, 32 aa, Artificial Sequence
  Description of Artificial Sequence: Synthetic polypeptide
  Synthetic Construct
GVPDRFAGSGSGTDFTLKISRLEADDLGIYYC

SEQ ID NO: 953 - protein, 32 aa, Artificial Sequence
  Description of Artificial Sequence: Synthetic polypeptide
  Synthetic Construct
GVPDRFTGSGSGTDFTLKISRVEAEDLGVYYC

SEQ ID NO: 954 - protein, 32 aa, Artificial Sequence
  Description of Artificial Sequence: Synthetic polypeptide
  Synthetic Construct
GVPARFSGSGSGTSYSLTINNMEAEDAATYYC

SEQ ID NO: 955 - protein, 32 aa, Artificial Sequence
  Description of Artificial Sequence: Synthetic polypeptide
  Synthetic Construct
GVPDRFSGSGSGTDFTLKISRVEAEDLGVYFC

SEQ ID NO: 956 - protein, 32 aa, Artificial Sequence
  Description of Artificial Sequence: Synthetic polypeptide
  Synthetic Construct
GVPARFSGSGSGTSYSLTISSMEAEDAATYYC

SEQ ID NO: 957 - protein, 32 aa, Artificial Sequence
  Description of Artificial Sequence: Synthetic polypeptide
  Synthetic Construct
GVPDRFSGSGSGTDFTLKISRVEAEDLGVYYC

SEQ ID NO: 958 - protein, 32 aa, Artificial Sequence
  Description of Artificial Sequence: Synthetic polypeptide
  Synthetic Construct
  MOD_RES (17)..(17): Glutamic acid or Glutamine
GVPDRFAGSGSGTDFTXKISRLEADDLGIYYC

SEQ ID NO: 959 - protein, 32 aa, Artificial Sequence
  Description of Artificial Sequence: Synthetic polypeptide
  Synthetic Construct
GVPDRFTGSGSGTDFTLTISSVKAEDLAVYCC

SEQ ID NO: 960 - protein, 32 aa, Artificial Sequence
  Description of Artificial Sequence: Synthetic polypeptide
  Synthetic Construct
GVPDRFSGSGSGTDFTLKISRVEGEDLGVYYC

SEQ ID NO: 961 - protein, 32 aa, Artificial Sequence
  Description of Artificial Sequence: Synthetic polypeptide
  Synthetic Construct
  MOD_RES (22)..(22): Glutamic acid or Glutamine
GVPSRFSGRGSGTQFFLKINSXQREDFGSYYC

SEQ ID NO: 962 - protein, 32 aa, Artificial Sequence
  Description of Artificial Sequence: Synthetic polypeptide
  Synthetic Construct
GVPSRFSASGSATQFSLKINSLQSADFGSYYC

SEQ ID NO: 963 - protein, 32 aa, Artificial Sequence
  Description of Artificial Sequence: Synthetic polypeptide
  Synthetic Construct
GVPDRFSGSGSGTDFTLKISRVEADDLGVYLC

SEQ ID NO: 964 - protein, 32 aa, Artificial Sequence
  Description of Artificial Sequence: Synthetic polypeptide
  Synthetic Construct
GVPDRFSGSGSGTDFTLRISGVEAEDLGVYFC

SEQ ID NO: 965 - protein, 33 aa, Artificial Sequence
  Description of Artificial Sequence: Synthetic polypeptide
  Synthetic Construct
  MOD_RES (15)..(15): Any Amino Acid
GVPGRFSGSGSGTYXSFKISSMEGKMGPLIIFC

SEQ ID NO: 966 - protein, 32 aa, Artificial Sequence
  Description of Artificial Sequence: Synthetic polypeptide
  Synthetic Construct
  MOD_RES (11)..(11): Glutamic acid or Glutamine
GVRDRFTGSGXGTDFTLTISSVQGEDLAIYYC

SEQ ID NO: 967 - protein, 32 aa, Artificial Sequence
  Description of Artificial Sequence: Synthetic polypeptide
  Synthetic Construct
GVPDRFTGSGSGTDFTLTISTVKAEDLAVYYC

SEQ ID NO: 968 - protein, 10 aa, Artificial Sequence
  Description of Artificial Sequence: Synthetic peptide
  Synthetic Construct
FGGGTKLEIK

SEQ ID NO: 969 - protein, 10 aa, Artificial Sequence
  Description of Artificial Sequence: Synthetic peptide
  Synthetic Construct
FGAGTKLELK

SEQ ID NO: 970 - protein, 10 aa, Artificial Sequence
  Description of Artificial Sequence: Synthetic peptide
  Synthetic Construct
FGGGTKLVIK

SEQ ID NO: 971 - protein, 10 aa, Artificial Sequence
  Description of Artificial Sequence: Synthetic peptide
  Synthetic Construct
FGGGTELEIK

SEQ ID NO: 972 - protein, 10 aa, Artificial Sequence
  Description of Artificial Sequence: Synthetic peptide
  Synthetic Construct
FGGGTKLEMK

SEQ ID NO: 973 - protein, 10 aa, Artificial Sequence
  Description of Artificial Sequence: Synthetic peptide
  Synthetic Construct
FGSGTKLEIK

SEQ ID NO: 974 - protein, 10 aa, Artificial Sequence
  Description of Artificial Sequence: Synthetic peptide
  Synthetic Construct
FGGGTKLEMN

SEQ ID NO: 975 - protein, 10 aa, Artificial Sequence
  Description of Artificial Sequence: Synthetic peptide
  Synthetic Construct
FGGGTKLEMK

SEQ ID NO: 976 - protein, 26 aa, Artificial Sequence
  Description of Artificial Sequence: Synthetic peptide
  Synthetic Construct
EVKLVESGGGLVKPGGSLKLSCAASG

SEQ ID NO: 977 - protein, 26 aa, Artificial Sequence
  Description of Artificial Sequence: Synthetic peptide
  Synthetic Construct
EVQLQQSGPELVKPGTSVKISCKTSG

SEQ ID NO: 978 - protein, 26 aa, Artificial Sequence
  Description of Artificial Sequence: Synthetic peptide
  Synthetic Construct
QVQLQQSGAELVRPGASVTLSCKASG

SEQ ID NO: 979 - protein, 26 aa, Artificial Sequence
  Description of Artificial Sequence: Synthetic peptide
  Synthetic Construct
EVKLEESGGGLVQPGGSMKLSCAASG

SEQ ID NO: 980 - protein, 26 aa, Artificial Sequence
  Description of Artificial Sequence: Synthetic peptide
  Synthetic Construct
EVQLVESGGGLVQPKGSLKLSCAASG

SEQ ID NO: 981 - protein, 26 aa, Artificial Sequence
  Description of Artificial Sequence: Synthetic peptide
  Synthetic Construct
QVQLQQSGAELVKPGASVKLSCKASG

SEQ ID NO: 982 - protein, 26 aa, Artificial Sequence
  Description of Artificial Sequence: Synthetic peptide
  Synthetic Construct
  MOD_RES (1)..(1): Glutamic acid or Glutamine
XVQLVESGGGLVQPKGSLKLSCAASG

SEQ ID NO: 983 - protein, 26 aa, Artificial Sequence
  Description of Artificial Sequence: Synthetic peptide
  Synthetic Construct
QVQLQQSGAELVKPGASVKMSCKTSG

SEQ ID NO: 984 - protein, 26 aa, Artificial Sequence
  Description of Artificial Sequence: Synthetic peptide
  Synthetic Construct
  MOD_RES (6)..(7): Glutamic acid or Glutamine
  MOD_RES (11)..(11): Any naturally occurring amino acid
  MOD_RES (18)..(18): Any Amino Acid
  MOD_RES (19)..(20): Any naturally occurring amino acid
  MOD_RES (24)..(24): Any naturally occurring amino acid
EVQLVXXGRGXSQGKGSXXXGRAXRC

SEQ ID NO: 985 - protein, 26 aa, Artificial Sequence
  Description of Artificial Sequence: Synthetic peptide
  Synthetic Construct
EVKLEESGGGLVQPGGSMKLSCTASG

SEQ ID NO: 986 - protein, 7 aa, Artificial Sequence
  Description of Artificial Sequence: Synthetic peptide
  Synthetic Construct
LSCAASG

SEQ ID NO: 987 - protein, 26 aa, Artificial Sequence
  Description of Artificial Sequence: Synthetic peptide
  Synthetic Construct
QVQLQQSGAVLVKPGASVKLSCKASG

SEQ ID NO: 988 - protein, 26 aa, Artificial Sequence
  Description of Artificial Sequence: Synthetic peptide
  Synthetic Construct
EVQLQQSGAELVKPGASVKISCKASG

SEQ ID NO: 989 - protein, 26 aa, Artificial Sequence
  Description of Artificial Sequence: Synthetic peptide
  Synthetic Construct
QVQLQQSGPELVKPGASLKISCKASG

SEQ ID NO: 990 - protein, 26 aa, Artificial Sequence
  Description of Artificial Sequence: Synthetic peptide
  Synthetic Construct
EVQLVESGGGLVQPKGSLKLSCAAFG

SEQ ID NO: 991 - protein, 26 aa, Artificial Sequence
  Description of Artificial Sequence: Synthetic peptide
  Synthetic Construct
QVQLQQSGAEVVKPGASVKMSCKTSG

SEQ ID NO: 992 - protein, 26 aa, Artificial Sequence
  Description of Artificial Sequence: Synthetic peptide
  Synthetic Construct
EVQLVESGGRLVQPKGSLKLSCAASG

SEQ ID NO: 993 - protein, 26 aa, Artificial Sequence
  Description of Artificial Sequence: Synthetic peptide
  Synthetic Construct
QVQLQQYGPELVKPGASVKMSCKVSG

SEQ ID NO: 994 - protein, 18 aa, Artificial Sequence
  Description of Artificial Sequence: Synthetic peptide
  Synthetic Construct
WRIGQGKGSLKLARAARG

SEQ ID NO: 995 - protein, 12 aa, Artificial Sequence
  Description of Artificial Sequence: Synthetic peptide
  Synthetic Construct
WVRQTPEKRLEW

SEQ ID NO: 996 - protein, 12 aa, Artificial Sequence
  Description of Artificial Sequence: Synthetic peptide
  Synthetic Construct
WVKQSHGKSLEW

SEQ ID NO: 997 - protein, 12 aa, Artificial Sequence
  Description of Artificial Sequence: Synthetic peptide
  Synthetic Construct
WVKQTPVHGLEW

SEQ ID NO: 998 - protein, 12 aa, Artificial Sequence
  Description of Artificial Sequence: Synthetic peptide
  Synthetic Construct
WVRQSPEKGLEW

SEQ ID NO: 999 - protein, 12 aa, Artificial Sequence
  Description of Artificial Sequence: Synthetic peptide
  Synthetic Construct
WVRQAPGKGLEW

SEQ ID NO: 1000 - protein, 12 aa, Artificial Sequence
  Description of Artificial Sequence: Synthetic peptide
  Synthetic Construct
WVKQRPGRGLEW

SEQ ID NO: 1001 - protein, 12 aa, Artificial Sequence
  Description of Artificial Sequence: Synthetic peptide
  Synthetic Construct
WVKQRPGQGLVW

SEQ ID NO: 1002 - protein, 12 aa, Artificial Sequence
  Description of Artificial Sequence: Synthetic peptide
  Synthetic Construct
GVPQGPGKGREW

SEQ ID NO: 1003 - protein, 12 aa, Artificial Sequence
  Description of Artificial Sequence: Synthetic peptide
  Synthetic Construct
WVKQRPGRGPEW

SEQ ID NO: 1004 - protein, 12 aa, Artificial Sequence
  Description of Artificial Sequence: Synthetic peptide
  Synthetic Construct
WVKQRPGKGLEW

SEQ ID NO: 1005 - protein, 12 aa, Artificial Sequence
  Description of Artificial Sequence: Synthetic peptide
  Synthetic Construct
WVRQTPGKGLEW

SEQ ID NO: 1006 - protein, 12 aa, Artificial Sequence
  Description of Artificial Sequence: Synthetic peptide
  Synthetic Construct
WMKQSHGKSLEW

SEQ ID NO: 1007 - protein, 12 aa, Artificial Sequence
  Description of Artificial Sequence: Synthetic peptide
  Synthetic Construct
RVRQGPGKGREW

SEQ ID NO: 1008 - protein, 35 aa, Artificial Sequence
  Description of Artificial Sequence: Synthetic polypeptide
  Synthetic Construct
DSVQGRFTFSRDNARNILYLQMSSLRSEDTAMYYC

SEQ ID NO: 1009 - protein, 35 aa, Artificial Sequence
  Description of Artificial Sequence: Synthetic polypeptide
  Synthetic Construct
QKFKGKASLTVDKSSSTAYMELHSLASDDSAVYYC

SEQ ID NO: 1010 - protein, 35 aa, Artificial Sequence
  Description of Artificial Sequence: Synthetic polypeptide
  Synthetic Construct
QKFKGKAILTADKSSSTAYMELRSLTSEDSAVYYC

SEQ ID NO: 1011 - protein, 35 aa, Artificial Sequence
  Description of Artificial Sequence: Synthetic polypeptide
  Synthetic Construct
ESVKGRFTISRDDSKSTVYLQMNTLRADDTGIYYC

SEQ ID NO: 1012 - protein, 35 aa, Artificial Sequence
  Description of Artificial Sequence: Synthetic polypeptide
  Synthetic Construct
DSVKDRITCSRDDSENMFYLQLSSLKTEDTAMYYC

SEQ ID NO: 1013 - protein, 35 aa, Artificial Sequence
  Description of Artificial Sequence: Synthetic polypeptide
  Synthetic Construct
EKFKTKATLTVDKPSSTAYMQVSSLTSEDSAVYYC

SEQ ID NO: 1014 - protein, 35 aa, Artificial Sequence
  Description of Artificial Sequence: Synthetic polypeptide
  Synthetic Construct
DSVKDRFTCSRDDSENMFYLQLSSLKTEDTAIYYC

SEQ ID NO: 1015 - protein, 35 aa, Artificial Sequence
  Description of Artificial Sequence: Synthetic polypeptide
  Synthetic Construct
DSVKDRFTCSRDDSENMFYLQLSSLKTEDTAMYYC

SEQ ID NO: 1016 - protein, 35 aa, Artificial Sequence
  Description of Artificial Sequence: Synthetic polypeptide
  Synthetic Construct
EKFKTKATLTVDTSSSTAYMHLSSLTSEDSAVYFC

SEQ ID NO: 1017 - protein, 35 aa, Artificial Sequence
  Description of Artificial Sequence: Synthetic polypeptide
  Synthetic Construct
  MOD_RES (9)..(9): Glutamic acid or Glutamine
  MOD_RES (20)..(20): Glutamic acid or Glutamine
  MOD_RES (24)..(25): Any naturally occurring amino acid
  MOD_RES (27)..(27): Any naturally occurring amino acid
  MOD_RES (35)..(35): Any naturally occurring amino acid
DSVKDRFTXSRDDSESLFYXQMSXXKXEDTAMYYX

SEQ ID NO: 1018 - protein, 35 aa, Artificial Sequence
  Description of Artificial Sequence: Synthetic polypeptide
  Synthetic Construct
ESVKGRFTISRDDSKSTVYLQMNSLRTEDTGIYYC

SEQ ID NO: 1019 - protein, 35 aa, Artificial Sequence
  Description of Artificial Sequence: Synthetic polypeptide
  Synthetic Construct
  MOD_RES (23)..(23): Glutamic acid or Glutamine
DSVKDRFTISRDDSESMLYLQMXNLKTEDTAMYYC

SEQ ID NO: 1020 - protein, 35 aa, Artificial Sequence
  Description of Artificial Sequence: Synthetic polypeptide
  Synthetic Construct
  MOD_RES (30)..(30): Glutamic acid or Glutamine
EKFRNKAILTVDKPSSTAYMQLNSLTSEDXAVYYC

SEQ ID NO: 1021 - protein, 35 aa, Artificial Sequence
  Description of Artificial Sequence: Synthetic polypeptide
  Synthetic Construct
GKFEGKATLTADKSSSTAYMQLSSLTSEDSAVYFC

SEQ ID NO: 1022 - protein, 35 aa, Artificial Sequence
  Description of Artificial Sequence: Synthetic polypeptide
  Synthetic Construct
GEFRVRATLTADTSSTTAYMQLSSLTSEDSAVYFC

SEQ ID NO: 1023 - protein, 35 aa, Artificial Sequence
  Description of Artificial Sequence: Synthetic polypeptide
  Synthetic Construct
EKFKTKATLTVDKPSSTADMQLSSLTSEDSAVYYC

SEQ ID NO: 1024 - protein, 35 aa, Artificial Sequence
  Description of Artificial Sequence: Synthetic polypeptide
  Synthetic Construct
DSVKDRFTISRDDSESIVYVQMNNLKTEDTGMYSC

SEQ ID NO: 1025 - protein, 35 aa, Artificial Sequence
  Description of Artificial Sequence: Synthetic polypeptide
  Synthetic Construct
ERFKTKATLTVDTSSSTAYMHLSSLTSEDSAVYFC

SEQ ID NO: 1026 - protein, 35 aa, Artificial Sequence
  Description of Artificial Sequence: Synthetic polypeptide
  Synthetic Construct
DSVKDRFTISRDDSESMLYLQMNNLKTEDTAMYYC

SEQ ID NO: 1027 - protein, 35 aa, Artificial Sequence
  Description of Artificial Sequence: Synthetic polypeptide
  Synthetic Construct
  MOD_RES (34)..(34): Glutamic acid or Glutamine
QEFKGKATLTVDKSSSTAYMELRSLTFEDSAVYXC

SEQ ID NO: 1028 - protein, 35 aa, Artificial Sequence
  Description of Artificial Sequence: Synthetic polypeptide
  Synthetic Construct
DSVKDRFRASRDDSESMLYVQMSNWKQEDTAMYYG

SEQ ID NO: 1029 - protein, 11 aa, Artificial Sequence
  Description of Artificial Sequence: Synthetic peptide
  Synthetic Construct
WGQGTLVTVSA

SEQ ID NO: 1030 - protein, 11 aa, Artificial Sequence
  Description of Artificial Sequence: Synthetic peptide
  Synthetic Construct
WGQGTSVTVSS

SEQ ID NO: 1031 - protein, 11 aa, Artificial Sequence
  Description of Artificial Sequence: Synthetic peptide
  Synthetic Construct
WGQGTTLTVSS

SEQ ID NO: 1032 - protein, 11 aa, Artificial Sequence
  Description of Artificial Sequence: Synthetic peptide
  Synthetic Construct
WGTGTTVTVST

SEQ ID NO: 1033 - protein, 11 aa, Artificial Sequence
  Description of Artificial Sequence: Synthetic peptide
  Synthetic Construct
WGTGTTVTVSS

SEQ ID NO: 1034 - protein, 11 aa, Artificial Sequence
  Description of Artificial Sequence: Synthetic peptide
  Synthetic Construct
WGQGTLVTVST

SEQ ID NO: 1035 - protein, 10 aa, Artificial Sequence
  Description of Artificial Sequence: Synthetic peptide
  Synthetic Construct
WGQGTIVTVS

SEQ ID NO: 1036 - protein, 11 aa, Artificial Sequence
  Description of Artificial Sequence: Synthetic peptide
  Synthetic Construct
WGQGASVTVSS

SEQ ID NO: 1037 - protein, 7 aa, Artificial Sequence
  Description of Artificial Sequence: Synthetic peptide
  Synthetic Construct
WGRGTLV

SEQ ID NO: 1038 - protein, 5 aa, Artificial Sequence
  Description of Artificial Sequence: Synthetic peptide
  Synthetic Construct
WGQGT

SEQ ID NO: 1039 - protein, 108 aa, Artificial Sequence
  Description of Artificial Sequence: Synthetic polypeptide
  Synthetic Construct
  MOD_RES (3)..(3): Glutamic acid or Glutamine
DIXVTQSPASLSASVGETVTITCRASENIYSFLAWYQLKQGKSPQLLVYNSKTFAEGVPSRFSGSGSGTQFSLRINSLQPEDFGSYYCQHHYGTPPWTFGGGTKLEIK

SEQ ID NO: 1040 - protein, 108 aa, Artificial Sequence
  Description of Artificial Sequence: Synthetic polypeptide
  Synthetic Construct
EIVMTQSPATLSVSPGERATLSCRASENIYSFLAWYQQKPGQAPRLLIYNSKTFAEGIPARFSGSGSGTEFTLTISSLQSEDFAVYYCQHHYGTPPWTFGQGTKVEIK

SEQ ID NO: 1041 - protein, 108 aa, Artificial Sequence
  Description of Artificial Sequence: Synthetic polypeptide
  Synthetic Construct
DIQLTQSPSFLSASVGDRVTITCRASENIYSFLAWYQQKPGKAPKLLIYNSKTFAEGVPSRFSGSGSGTEFTLTISSLQPEDFATYYCQHHYGTPPWTFGQGTKVEIK

SEQ ID NO: 1042 - protein, 108 aa, Artificial Sequence
  Description of Artificial Sequence: Synthetic polypeptide
  Synthetic Construct
EIVLTQSPATLSLSPGERATLSCRASENIYSFLAWYQQKPGQAPRLLIYNSKTFAEGIPARFSGSGSGTDFTLTISSLEPEDFAVYYCQHHYGTPPWTFGQGTKVEIK

SEQ ID NO: 1043 - protein, 108 aa, Artificial Sequence
  Description of Artificial Sequence: Synthetic polypeptide
  Synthetic Construct
DIQMTQSPSTLSASVGDRVTITCRASENIYSFLAWYQQKPGKAPKLLIYNSKTFAEGVPSRFSGSGSGTEFTLTISSLQPDDFATYYCQHHYGTPPWTFGQGTKVEIK

SEQ ID NO: 1044 - protein, 108 aa, Artificial Sequence
  Description of Artificial Sequence: Synthetic polypeptide
  Synthetic Construct
DIQMTQSPSSLSASVGDRVTITCRASENIYSFLAWYQQKPGKAPKLLIYNSKTFAEGVPSRFSGSGSGTDFTLTISSLQPEDFATYYCQHHYGTPPWTFGQGTKVEIK

SEQ ID NO: 1045 - protein, 108 aa, Artificial Sequence
  Description of Artificial Sequence: Synthetic polypeptide
  Synthetic Construct
DIQMTQSPSSLSASVGDRVTITCRASENIYSFLAWYQQKPGKAPKLLIYNSKTFAEGVPSRFSGSGSGTDFTFTISSLQPEDIATYYCQHHYGTPPWTFGQGTKVEIK

SEQ ID NO: 1046 - protein, 108 aa, Artificial Sequence
  Description of Artificial Sequence: Synthetic polypeptide
  Synthetic Construct
EIVLTQSPGTLSLSPGERATLSCRASENIYSFLAWYQQKPGQAPRLLIYNSKTFAEGIPDRFSGSGSGTDFTLTISRLEPEDFAVYYCQHHYGTPPWTFGQGTKVEIK

SEQ ID NO: 1047 - protein, 108 aa, Artificial Sequence
  Description of Artificial Sequence: Synthetic polypeptide
  Synthetic Construct
DIVMTQSPLSLPVTPGEPASISCRASENIYSFLAWYLQKPGQSPQLLIYNSKTFAEGVPDRFSGSGSGTDFTLKISRVEAEDVGVYYCQHHYGTPPWTFGQGTKVEIK

SEQ ID NO: 1048 - protein, 108 aa, Artificial Sequence
  Description of Artificial Sequence: Synthetic polypeptide
  Synthetic Construct
DVVMTQSPLSLPVTLGQPASISCRASENIYSFLAWFQQRPGQSPRRLIYNSKTFAEGVPDRFSGSGSGTDFTLKISRVEAEDVGVYYCQHHYGTPPWTFGQGTKVEIK

SEQ ID NO: 1049 - protein, 108 aa, Artificial Sequence
  Description of Artificial Sequence: Synthetic polypeptide
  Synthetic Construct
DIVMTQSPDSLAVSLGERATINCRASENIYSFLAWYQQKPGQPPKLLIYNSKTFAEGVPDRFSGSGSGTDFTLTISSLQAEDVAVYYCQHHYGTPPWTFGQGTKVEIK

SEQ ID NO: 1050 - protein, 111 aa, Artificial Sequence
  Description of Artificial Sequence: Synthetic polypeptide
  Synthetic Construct
TMSQSPSSLAVSVGEKVTMSCKSSQSLLYSSNQKNCLAWYQQKPGQSPKLLIYWAFTRESGVPDRFTGSGSGTDFTLTISSVKAEDLAVYYCQQYYSYPLTFGAGTKLELK

SEQ ID NO: 1051 - protein, 113 aa, Artificial Sequence
  Description of Artificial Sequence: Synthetic polypeptide
  Synthetic Construct
DIVMTQSPDSLAVSLGERATINCKSSQSLLYSSNQKNCLAWYQQKPGQPPKLLIYWAFTRESGVPDRFSGSGSGTDFTLTISSLQAEDVAVYYCQQYYSYPLTFGQGTKVEIK

SEQ ID NO: 1052 - protein, 113 aa, Artificial Sequence
  Description of Artificial Sequence: Synthetic polypeptide
  Synthetic Construct
DVVMTQSPLSLPVTLGQPASISCKSSQSLLYSSNQKNCLAWFQQRPGQSPRRLIYWAFTRESGVPDRFSGSGSGTDFTLKISRVEAEDVGVYYCQQYYSYPLTFGQGTKVEIK

SEQ ID NO: 1053 - protein, 113 aa, Artificial Sequence
  Description of Artificial Sequence: Synthetic polypeptide
  Synthetic Construct
DIVMTQSPLSLPVTPGEPASISCKSSQSLLYSSNQKNCLAWYLQKPGQSPQLLIYWAFTRESGVPDRFSGSGSGTDFTLKISRVEAEDVGVYYCQQYYSYPLTFGQGTKVEIK

SEQ ID NO: 1054 - protein, 113 aa, Artificial Sequence
  Description of Artificial Sequence: Synthetic polypeptide
  Synthetic Construct
DIQLTQSPSFLSASVGDRVTITCKSSQSLLYSSNQKNCLAWYQQKPGKAPKLLIYWAFTRESGVPSRFSGSGSGTEFTLTISSLQPEDFATYYCQQYYSYPLTFGQGTKVEIK

SEQ ID NO: 1055 - protein, 113 aa, Artificial Sequence
  Description of Artificial Sequence: Synthetic polypeptide
  Synthetic Construct
DIQMTQSPSTLSASVGDRVTITCKSSQSLLYSSNQKNCLAWYQQKPGKAPKLLIYWAFTRESGVPSRFSGSGSGTEFTLTISSLQPDDFATYYCQQYYSYPLTFGQGTKVEIK

SEQ ID NO: 1056 - protein, 113 aa, Artificial Sequence
  Description of Artificial Sequence: Synthetic polypeptide
  Synthetic Construct
EIVMTQSPATLSVSPGERATLSCKSSQSLLYSSNQKNCLAWYQQKPGQAPRLLIYWAFTRESGIPARFSGSGSGTEFTLTISSLQSEDFAVYYCQQYYSYPLTFGQGTKVEIK

SEQ ID NO: 1057 - protein, 113 aa, Artificial Sequence
  Description of Artificial Sequence: Synthetic polypeptide
  Synthetic Construct
DIQMTQSPSSLSASVGDRVTITCKSSQSLLYSSNQKNCLAWYQQKPGKAPKLLIYWAFTRESGVPSRFSGSGSGTDFTFTISSLQPEDIATYYCQQYYSYPLTFGQGTKVEIK

SEQ ID NO: 1058 - protein, 113 aa, Artificial Sequence
  Description of Artificial Sequence: Synthetic polypeptide
  Synthetic Construct
DIQMTQSPSSLSASVGDRVTITCKSSQSLLYSSNQKNCLAWYQQKPGKAPKLLIYWAFTRESGVPSRFSGSGSGTDFTLTISSLQPEDFATYYCQQYYSYPLTFGQGTKVEIK

SEQ ID NO: 1059 - protein, 113 aa, Artificial Sequence
  Description of Artificial Sequence: Synthetic polypeptide
  Synthetic Construct
EIVLTQSPATLSLSPGERATLSCKSSQSLLYSSNQKNCLAWYQQKPGQAPRLLIYWAFTRESGIPARFSGSGSGTDFTLTISSLEPEDFAVYYCQQYYSYPLTFGQGTKVEIK

SEQ ID NO: 1060 - protein, 113 aa, Artificial Sequence
  Description of Artificial Sequence: Synthetic polypeptide
  Synthetic Construct
EIVLTQSPGTLSLSPGERATLSCKSSQSLLYSSNQKNCLAWYQQKPGQAPRLLIYWAFTRESGIPDRFSGSGSGTDFTLTISRLEPEDFAVYYCQQYYSYPLTFGQGTKVEIK

SEQ ID NO: 1061 - protein, 112 aa, Artificial Sequence
  Description of Artificial Sequence: Synthetic polypeptide
  Synthetic Construct
  MOD_RES (3)..(3): Glutamic acid or Glutamine
DVXMTQTPLTLSVTIGQPASISCKSSQSLLYSNGKTFLSWLLQRPGQSPKRLIYLVSKLDSGVPDRFAGSGSGTDFTLKISRLEADDLGIYYCMQGTHFPLTFGAGTKLELK

SEQ ID NO: 1062 - protein, 112 aa, Artificial Sequence
  Description of Artificial Sequence: Synthetic polypeptide
  Synthetic Construct
DVVMTQSPLSLPVTLGQPASISCKSSQSLLYSNGKTFLSWFQQRPGQSPRRLIYLVSKLDSGVPDRFSGSGSGTDFTLKISRVEAEDVGVYYCMQGTHFPLTFGQGTKVEIK

SEQ ID NO: 1063 - protein, 112 aa, Artificial Sequence
  Description of Artificial Sequence: Synthetic polypeptide
  Synthetic Construct
DIVMTQSPLSLPVTPGEPASISCKSSQSLLYSNGKTFLSWYLQKPGQSPQLLIYLVSKLDSGVPDRFSGSGSGTDFTLKISRVEAEDVGVYYCMQGTHFPLTFGQGTKVEIK

SEQ ID NO: 1064 - protein, 112 aa, Artificial Sequence
  Description of Artificial Sequence: Synthetic polypeptide
  Synthetic Construct
DIVMTQSPDSLAVSLGERATINCKSSQSLLYSNGKTFLSWYQQKPGQPPKLLIYLVSKLDSGVPDRFSGSGSGTDFTLTISSLQAEDVAVYYCMQGTHFPLTFGQGTKVEIK

SEQ ID NO: 1065 - protein, 112 aa, Artificial Sequence
  Description of Artificial Sequence: Synthetic polypeptide
  Synthetic Construct
DIQMTQSPSTLSASVGDRVTITCKSSQSLLYSNGKTFLSWYQQKPGKAPKLLIYLVSKLDSGVPSRFSGSGSGTEFTLTISSLQPDDFATYYCMQGTHFPLTFGQGTKVEIK

SEQ ID NO: 1066 - protein, 112 aa, Artificial Sequence
  Description of Artificial Sequence: Synthetic polypeptide
  Synthetic Construct
DIQLTQSPSFLSASVGDRVTITCKSSQSLLYSNGKTFLSWYQQKPGKAPKLLIYLVSKLDSGVPSRFSGSGSGTEFTLTISSLQPEDFATYYCMQGTHFPLTFGQGTKVEIK

SEQ ID NO: 1067 - protein, 112 aa, Artificial Sequence
  Description of Artificial Sequence: Synthetic polypeptide
  Synthetic Construct
DIQMTQSPSSLSASVGDRVTITCKSSQSLLYSNGKTFLSWYQQKPGKAPKLLIYLVSKLDSGVPSRFSGSGSGTDFTLTISSLQPEDFATYYCMQGTHFPLTFGQGTKVEIK

SEQ ID NO: 1068 - protein, 112 aa, Artificial Sequence
  Description of Artificial Sequence: Synthetic polypeptide
  Synthetic Construct
DIQMTQSPSSLSASVGDRVTITCKSSQSLLYSNGKTFLSWYQQKPGKAPKLLIYLVSKLDSGVPSRFSGSGSGTDFTFTISSLQPEDIATYYCMQGTHFPLTFGQGTKVEIK

SEQ ID NO: 1069 - protein, 112 aa, Artificial Sequence
  Description of Artificial Sequence: Synthetic polypeptide
  Synthetic Construct
EIVMTQSPATLSVSPGERATLSCKSSQSLLYSNGKTFLSWYQQKPGQAPRLLIYLVSKLDSGIPARFSGSGSGTEFTLTISSLQSEDFAVYYCMQGTHFPLTFGQGTKVEIK

SEQ ID NO: 1070 - protein, 112 aa, Artificial Sequence
  Description of Artificial Sequence: Synthetic polypeptide
  Synthetic Construct
EIVLTQSPATLSLSPGERATLSCKSSQSLLYSNGKTFLSWYQQKPGQAPRLLIYLVSKLDSGIPARFSGSGSGTDFTLTISSLEPEDFAVYYCMQGTHFPLTFGQGTKVEIK

SEQ ID NO: 1071 - protein, 112 aa, Artificial Sequence
  Description of Artificial Sequence: Synthetic polypeptide
  Synthetic Construct
EIVLTQSPGTLSLSPGERATLSCKSSQSLLYSNGKTFLSWYQQKPGQAPRLLIYLVSKLDSGIPDRFSGSGSGTDFTLTISRLEPEDFAVYYCMQGTHFPLTFGQGTKVEIK

SEQ ID NO: 1072 - protein, 112 aa, Artificial Sequence
  Description of Artificial Sequence: Synthetic polypeptide
  Synthetic Construct
  MOD_RES (3)..(3): Glutamic acid or Glutamine
DVXMTQTPLTLSVTIGQPASISCKSSQSLLDSDGKTYLNWLLQRPGQSPKRLIYLVSKLDSGVPDRFTGSGSGTDFTLKISRVEAEDLGVYYCWQGTHFPYTFGGGTKLEIK

SEQ ID NO: 1073 - protein, 112 aa, Artificial Sequence
  Description of Artificial Sequence: Synthetic polypeptide
  Synthetic Construct
DVVMTQSPLSLPVTLGQPASISCKSSQSLLDSDGKTYLNWFQQRPGQSPRRLIYLVSKLDSGVPDRFSGSGSGTDFTLKISRVEAEDVGVYYCWQGTHFPYTFGQGTKVEIK

SEQ ID NO: 1074 - protein, 112 aa, Artificial Sequence
  Description of Artificial Sequence: Synthetic polypeptide
  Synthetic Construct
DIVMTQSPLSLPVTPGEPASISCKSSQSLLDSDGKTYLNWYLQKPGQSPQLLIYLVSKLDSGVPDRFSGSGSGTDFTLKISRVEAEDVGVYYCWQGTHFPYTFGQGTKVEIK

SEQ ID NO: 1075 - protein, 112 aa, Artificial Sequence
  Description of Artificial Sequence: Synthetic polypeptide
  Synthetic Construct
DIVMTQSPDSLAVSLGERATINCKSSQSLLDSDGKTYLNWYQQKPGQPPKLLIYLVSKLDSGVPDRFSGSGSGTDFTLTISSLQAEDVAVYYCWQGTHFPYTFGQGTKVEIK

SEQ ID NO: 1076 - protein, 112 aa, Artificial Sequence
  Description of Artificial Sequence: Synthetic polypeptide
  Synthetic Construct
DIQLTQSPSFLSASVGDRVTITCKSSQSLLDSDGKTYLNWYQQKPGKAPKLLIYLVSKLDSGVPSRFSGSGSGTEFTLTISSLQPEDFATYYCWQGTHFPYTFGQGTKVEIK

SEQ ID NO: 1077 - protein, 112 aa, Artificial Sequence
  Description of Artificial Sequence: Synthetic polypeptide
  Synthetic Construct
DIQMTQSPSTLSASVGDRVTITCKSSQSLLDSDGKTYLNWYQQKPGKAPKLLIYLVSKLDSGVPSRFSGSGSGTEFTLTISSLQPDDFATYYCWQGTHFPYTFGQGTKVEIK

SEQ ID NO: 1078 - protein, 112 aa, Artificial Sequence
  Description of Artificial Sequence: Synthetic polypeptide
  Synthetic Construct
DIQMTQSPSSLSASVGDRVTITCKSSQSLLDSDGKTYLNWYQQKPGKAPKLLIYLVSKLDSGVPSRFSGSGSGTDFTLTISSLQPEDFATYYCWQGTHFPYTFGQGTKVEIK

SEQ ID NO: 1079 - protein, 112 aa, Artificial Sequence
  Description of Artificial Sequence: Synthetic polypeptide
  Synthetic Construct
DIQMTQSPSSLSASVGDRVTITCKSSQSLLDSDGKTYLNWYQQKPGKAPKLLIYLVSKLDSGVPSRFSGSGSGTDFTFTISSLQPEDIATYYCWQGTHFPYTFGQGTKVEIK

SEQ ID NO: 1080 - protein, 112 aa, Artificial Sequence
  Description of Artificial Sequence: Synthetic polypeptide
  Synthetic Construct
EIVLTQSPATLSLSPGERATLSCKSSQSLLDSDGKTYLNWYQQKPGQAPRLLIYLVSKLDSGIPARFSGSGSGTDFTLTISSLEPEDFAVYYCWQGTHFPYTFGQGTKVEIK

SEQ ID NO: 1081 - protein, 112 aa, Artificial Sequence
  Description of Artificial Sequence: Synthetic polypeptide
  Synthetic Construct
EIVMTQSPATLSVSPGERATLSCKSSQSLLDSDGKTYLNWYQQKPGQAPRLLIYLVSKLDSGIPARFSGSGSGTEFTLTISSLQSEDFAVYYCWQGTHFPYTFGQGTKVEIK

SEQ ID NO: 1082 - protein, 112 aa, Artificial Sequence
  Description of Artificial Sequence: Synthetic polypeptide
  Synthetic Construct
EIVLTQSPGTLSLSPGERATLSCKSSQSLLDSDGKTYLNWYQQKPGQAPRLLIYLVSKLDSGIPDRFSGSGSGTDFTLTISRLEPEDFAVYYCWQGTHFPYTFGQGTKVEIK

SEQ ID NO: 1083 - protein, 104 aa, Artificial Sequence
  Description of Artificial Sequence: Synthetic polypeptide
  Synthetic Construct
VLTQSPALMSASPGEKVTMTCSASSSVSYMYWYQQKPRSSPKPWIYLTSILASGVPARFSGSGSGTSYSLTINNMEAEDAATYYCQQWSFNPYTFGGGTKLVIK

SEQ ID NO: 1084 - protein, 106 aa, Artificial Sequence
  Description of Artificial Sequence: Synthetic polypeptide
  Synthetic Construct
EIVLTQSPATLSLSPGERATLSCSASSSVSYMYWYQQKPGQAPRLLIYLTSILASGIPARFSGSGSGTDFTLTISSLEPEDFAVYYCQQWSFNPYTFGQGTKVEIK

SEQ ID NO: 1085 - protein, 106 aa, Artificial Sequence
  Description of Artificial Sequence: Synthetic polypeptide
  Synthetic Construct
DIQMTQSPSSLSASVGDRVTITCSASSSVSYMYWYQQKPGKAPKLLIYLTSILASGVPSRFSGSGSGTDFTLTISSLQPEDFATYYCQQWSFNPYTFGQGTKVEIK

SEQ ID NO: 1086 - protein, 106 aa, Artificial Sequence
  Description of Artificial Sequence: Synthetic polypeptide
  Synthetic Construct
DIQMTQSPSTLSASVGDRVTITCSASSSVSYMYWYQQKPGKAPKLLIYLTSILASGVPSRFSGSGSGTEFTLTISSLQPDDFATYYCQQWSFNPYTFGQGTKVEIK

SEQ ID NO: 1087 - protein, 106 aa, Artificial Sequence
  Description of Artificial Sequence: Synthetic polypeptide
  Synthetic Construct
EIVMTQSPATLSVSPGERATLSCSASSSVSYMYWYQQKPGQAPRLLIYLTSILASGIPARFSGSGSGTEFTLTISSLQSEDFAVYYCQQWSFNPYTFGQGTKVEIK

SEQ ID NO: 1088 - protein, 106 aa, Artificial Sequence
  Description of Artificial Sequence: Synthetic polypeptide
  Synthetic Construct
DIQLTQSPSFLSASVGDRVTITCSASSSVSYMYWYQQKPGKAPKLLIYLTSILASGVPSRFSGSGSGTEFTLTISSLQPEDFATYYCQQWSFNPYTFGQGTKVEIK

SEQ ID NO: 1089 - protein, 106 aa, Artificial Sequence
  Description of Artificial Sequence: Synthetic polypeptide
  Synthetic Construct
DIQMTQSPSSLSASVGDRVTITCSASSSVSYMYWYQQKPGKAPKLLIYLTSILASGVPSRFSGSGSGTDFTFTISSLQPEDIATYYCQQWSFNPYTFGQGTKVEIK

SEQ ID NO: 1090 - protein, 106 aa, Artificial Sequence
  Description of Artificial Sequence: Synthetic polypeptide
  Synthetic Construct
EIVLTQSPGTLSLSPGERATLSCSASSSVSYMYWYQQKPGQAPRLLIYLTSILASGIPDRFSGSGSGTDFTLTISRLEPEDFAVYYCQQWSFNPYTFGQGTKVEIK

SEQ ID NO: 1091 - protein, 106 aa, Artificial Sequence
  Description of Artificial Sequence: Synthetic polypeptide
  Synthetic Construct
DIVMTQSPLSLPVTPGEPASISCSASSSVSYMYWYLQKPGQSPQLLIYLTSILASGVPDRFSGSGSGTDFTLKISRVEAEDVGVYYCQQWSFNPYTFGQGTKVEIK

SEQ ID NO: 1092 - protein, 106 aa, Artificial Sequence
  Description of Artificial Sequence: Synthetic polypeptide
  Synthetic Construct
DVVMTQSPLSLPVTLGQPASISCSASSSVSYMYWFQQRPGQSPRRLIYLTSILASGVPDRFSGSGSGTDFTLKISRVEAEDVGVYYCQQWSFNPYTFGQGTKVEIK

SEQ ID NO: 1093 - protein, 106 aa, Artificial Sequence
  Description of Artificial Sequence: Synthetic polypeptide
  Synthetic Construct
DIVMTQSPDSLAVSLGERATINCSASSSVSYMYWYQQKPGQPPKLLIYLTSILASGVPDRFSGSGSGTDFTLTISSLQAEDVAVYYCQQWSFNPYTFGQGTKVEIK

SEQ ID NO: 1094 - protein, 112 aa, Artificial Sequence
  Description of Artificial Sequence: Synthetic polypeptide
  Synthetic Construct
  MOD_RES (3)..(3): Glutamic acid or Glutamine
DVXMTQTPLSLPVSLGDQASISCRSSQSLVHSNGNTYLHWYLQKPGQSPKLLIYKVSNRFSGVPDRFSGSGSGTDFTLKISRVEAEDLGVYFCSQSTHVPLTFGAGTKLELK

SEQ ID NO: 1095 - protein, 112 aa, Artificial Sequence
  Description of Artificial Sequence: Synthetic polypeptide
  Synthetic Construct
DVVMTQSPLSLPVTLGQPASISCRSSQSLVHSNGNTYLHWFQQRPGQSPRRLIYKVSNRFSGVPDRFSGSGSGTDFTLKISRVEAEDVGVYYCSQSTHVPLTFGQGTKVEIK

SEQ ID NO: 1096 - protein, 112 aa, Artificial Sequence
  Description of Artificial Sequence: Synthetic polypeptide
  Synthetic Construct
DIVMTQSPLSLPVTPGEPASISCRSSQSLVHSNGNTYLHWYLQKPGQSPQLLIYKVSNRFSGVPDRFSGSGSGTDFTLKISRVEAEDVGVYYCSQSTHVPLTFGQGTKVEIK

SEQ ID NO: 1097 - protein, 112 aa, Artificial Sequence
  Description of Artificial Sequence: Synthetic polypeptide
  Synthetic Construct
DIVMTQSPDSLAVSLGERATINCRSSQSLVHSNGNTYLHWYQQKPGQPPKLLIYKVSNRFSGVPDRFSGSGSGTDFTLTISSLQAEDVAVYYCSQSTHVPLTFGQGTKVEIK

SEQ ID NO: 1098 - protein, 112 aa, Artificial Sequence
  Description of Artificial Sequence: Synthetic polypeptide
  Synthetic Construct
EIVLTQSPATLSLSPGERATLSCRSSQSLVHSNGNTYLHWYQQKPGQAPRLLIYKVSNRFSGIPARFSGSGSGTDFTLTISSLEPEDFAVYYCSQSTHVPLTFGQGTKVEIK

SEQ ID NO: 1099 - protein, 112 aa, Artificial Sequence
  Description of Artificial Sequence: Synthetic polypeptide
  Synthetic Construct
DIQMTQSPSSLSASVGDRVTITCRSSQSLVHSNGNTYLHWYQQKPGKAPKLLIYKVSNRFSGVPSRFSGSGSGTDFTLTISSLQPEDFATYYCSQSTHVPLTFGQGTKVEIK

SEQ ID NO: 1100 - protein, 112 aa, Artificial Sequence
  Description of Artificial Sequence: Synthetic polypeptide
  Synthetic Construct
DIQMTQSPSSLSASVGDRVTITCRSSQSLVHSNGNTYLHWYQQKPGKAPKLLIYKVSNRFSGVPSRFSGSGSGTDFTFTISSLQPEDIATYYCSQSTHVPLTFGQGTKVEIK

SEQ ID NO: 1101 - protein, 112 aa, Artificial Sequence
  Description of Artificial Sequence: Synthetic polypeptide
  Synthetic Construct
EIVMTQSPATLSVSPGERATLSCRSSQSLVHSNGNTYLHWYQQKPGQAPRLLIYKVSNRFSGIPARFSGSGSGTEFTLTISSLQSEDFAVYYCSQSTHVPLTFGQGTKVEIK

SEQ ID NO: 1102 - protein, 112 aa, Artificial Sequence
  Description of Artificial Sequence: Synthetic polypeptide
  Synthetic Construct
DIQMTQSPSTLSASVGDRVTITCRSSQSLVHSNGNTYLHWYQQKPGKAPKLLIYKVSNRFSGVPSRFSGSGSGTEFTLTISSLQPDDFATYYCSQSTHVPLTFGQGTKVEIK

SEQ ID NO: 1103 - protein, 112 aa, Artificial Sequence
  Description of Artificial Sequence: Synthetic polypeptide
  Synthetic Construct
DIQLTQSPSFLSASVGDRVTITCRSSQSLVHSNGNTYLHWYQQKPGKAPKLLIYKVSNRFSGVPSRFSGSGSGTEFTLTISSLQPEDFATYYCSQSTHVPLTFGQGTKVEIK

SEQ ID NO: 1104 - protein, 112 aa, Artificial Sequence
  Description of Artificial Sequence: Synthetic polypeptide
  Synthetic Construct
EIVLTQSPGTLSLSPGERATLSCRSSQSLVHSNGNTYLHWYQQKPGQAPRLLIYKVSNRFSGIPDRFSGSGSGTDFTLTISRLEPEDFAVYYCSQSTHVPLTFGQGTKVEIK

SEQ ID NO: 1105 - protein, 104 aa, Artificial Sequence
  Description of Artificial Sequence: Synthetic polypeptide
  Synthetic Construct
  MOD_RES (10)..(10): Glutamic acid or Glutamine
VLTQSPAIMXASPGEKVTMTCSASSSVSYMYWYQQKPRSSPKPWIYLTSILASGVPARFSGSGSGTSYSLTISSMEAEDAATYYCQQWSFNPYTFGGGTKLVIK

SEQ ID NO: 1106 - protein, 105 aa, Artificial Sequence
  Description of Artificial Sequence: Synthetic polypeptide
  Synthetic Construct
NVLTQSPALMSASPGEKVTMTCSASSSVSYMYWYQQKPRSSPKPWIYLTSILASGVPARFSGSGSGTSYSLTISSMEAEDAATYYCQQWSFNPYTFGGGTKLVIK

SEQ ID NO: 1107 - protein, 112 aa, Artificial Sequence
  Description of Artificial Sequence: Synthetic polypeptide
  Synthetic Construct
DVVMTQTPLSLPVSLGDQASISCRSSQTIIHSNGNTYLEWYLRKPGQSPKLLIYKVSNRFSGVPDRFSGSGSGTDFTLKISRVEAEDLGVYYCFQGSHVPYTFGGGTELEIK

SEQ ID NO: 1108 - protein, 112 aa, Artificial Sequence
  Description of Artificial Sequence: Synthetic polypeptide
  Synthetic Construct
DVVMTQSPLSLPVTLGQPASISCRSSQTIIHSNGNTYLEWFQQRPGQSPRRLIYKVSNRFSGVPDRFSGSGSGTDFTLKISRVEAEDVGVYYCFQGSHVPYTFGQGTKVEIK

SEQ ID NO: 1109 - protein, 112 aa, Artificial Sequence
  Description of Artificial Sequence: Synthetic polypeptide
  Synthetic Construct
DIVMTQSPLSLPVTPGEPASISCRSSQTIIHSNGNTYLEWYLQKPGQSPQLLIYKVSNRFSGVPDRFSGSGSGTDFTLKISRVEAEDVGVYYCFQGSHVPYTFGQGTKVEIK

SEQ ID NO: 1110 - protein, 112 aa, Artificial Sequence
  Description of Artificial Sequence: Synthetic polypeptide
  Synthetic Construct
DIVMTQSPDSLAVSLGERATINCRSSQTIIHSNGNTYLEWYQQKPGQPPKLLIYKVSNRFSGVPDRFSGSGSGTDFTLTISSLQAEDVAVYYCFQGSHVPYTFGQGTKVEIK

SEQ ID NO: 1111 - protein, 112 aa, Artificial Sequence
  Description of Artificial Sequence: Synthetic polypeptide
  Synthetic Construct
EIVLTQSPATLSLSPGERATLSCRSSQTIIHSNGNTYLEWYQQKPGQAPRLLIYKVSNRFSGIPARFSGSGSGTDFTLTISSLEPEDFAVYYCFQGSHVPYTFGQGTKVEIK

SEQ ID NO: 1112 - protein, 112 aa, Artificial Sequence
  Description of Artificial Sequence: Synthetic polypeptide
  Synthetic Construct
DIQLTQSPSFLSASVGDRVTITCRSSQTIIHSNGNTYLEWYQQKPGKAPKLLIYKVSNRFSGVPSRFSGSGSGTEFTLTISSLQPEDFATYYCFQGSHVPYTFGQGTKVEIK

SEQ ID NO: 1113 - protein, 112 aa, Artificial Sequence
  Description of Artificial Sequence: Synthetic polypeptide
  Synthetic Construct
DIQMTQSPSSLSASVGDRVTITCRSSQTIIHSNGNTYLEWYQQKPGKAPKLLIYKVSNRFSGVPSRFSGSGSGTDFTFTISSLQPEDIATYYCFQGSHVPYTFGQGTKVEIK

SEQ ID NO: 1114 - protein, 112 aa, Artificial Sequence
  Description of Artificial Sequence: Synthetic polypeptide
  Synthetic Construct
DIQMTQSPSSLSASVGDRVTITCRSSQTIIHSNGNTYLEWYQQKPGKAPKLLIYKVSNRFSGVPSRFSGSGSGTDFTLTISSLQPEDFATYYCFQGSHVPYTFGQGTKVEIK

SEQ ID NO: 1115 - protein, 112 aa, Artificial Sequence
  Description of Artificial Sequence: Synthetic polypeptide
  Synthetic Construct
EIVMTQSPATLSVSPGERATLSCRSSQTIIHSNGNTYLEWYQQKPGQAPRLLIYKVSNRFSGIPARFSGSGSGTEFTLTISSLQSEDFAVYYCFQGSHVPYTFGQGTKVEIK

SEQ ID NO: 1116 - protein, 112 aa, Artificial Sequence
  Description of Artificial Sequence: Synthetic polypeptide
  Synthetic Construct
DIQMTQSPSTLSASVGDRVTITCRSSQTIIHSNGNTYLEWYQQKPGKAPKLLIYKVSNRFSGVPSRFSGSGSGTEFTLTISSLQPDDFATYYCFQGSHVPYTFGQGTKVEIK

SEQ ID NO: 1117 - protein, 112 aa, Artificial Sequence
  Description of Artificial Sequence: Synthetic polypeptide
  Synthetic Construct
EIVLTQSPGTLSLSPGERATLSCRSSQTIIHSNGNTYLEWYQQKPGQAPRLLIYKVSNRFSGIPDRFSGSGSGTDFTLTISRLEPEDFAVYYCFQGSHVPYTFGQGTKVEIK

SEQ ID NO: 1118 - protein, 112 aa, Artificial Sequence
  Description of Artificial Sequence: Synthetic polypeptide
  Synthetic Construct
  MOD_RES (78)..(78): Glutamic acid or Glutamine
DVVMTQTPLTLSVTIGQPASISCKSSQSLLYSNGKTFLSWLLQRPGQSPKRLIYLVSKLDSGVPDRFAGSGSGTDFTXKISRLEADDLGIYYCMQGTHFPLTFGGGTKLEMK

SEQ ID NO: 1119 - protein, 112 aa, Artificial Sequence
  Description of Artificial Sequence: Synthetic polypeptide
  Synthetic Construct
ITMSQSPSSLAVSVGEKVTMSCKSSQSLLYSSDQKNYLAWYQQKPGQSPKLLIYWASTRESGVPDRFTGSGSGTDFTLTISSVKAEDLAVYCCQQYYSYPLTFGAGTKLELK

SEQ ID NO: 1120 - protein, 113 aa, Artificial Sequence
  Description of Artificial Sequence: Synthetic polypeptide
  Synthetic Construct
DIVMTQSPDSLAVSLGERATINCKSSQSLLYSSDQKNYLAWYQQKPGQPPKLLIYWASTRESGVPDRFSGSGSGTDFTLTISSLQAEDVAVYYCQQYYSYPLTFGQGTKVEIK

SEQ ID NO: 1121 - protein, 113 aa, Artificial Sequence
  Description of Artificial Sequence: Synthetic polypeptide
  Synthetic Construct
DIVMTQSPLSLPVTPGEPASISCKSSQSLLYSSDQKNYLAWYLQKPGQSPQLLIYWASTRESGVPDRFSGSGSGTDFTLKISRVEAEDVGVYYCQQYYSYPLTFGQGTKVEIK

SEQ ID NO: 1122 - protein, 113 aa, Artificial Sequence
  Description of Artificial Sequence: Synthetic polypeptide
  Synthetic Construct
DVVMTQSPLSLPVTLGQPASISCKSSQSLLYSSDQKNYLAWFQQRPGQSPRRLIYWASTRESGVPDRFSGSGSGTDFTLKISRVEAEDVGVYYCQQYYSYPLTFGQGTKVEIK

SEQ ID NO: 1123 - protein, 113 aa, Artificial Sequence
  Description of Artificial Sequence: Synthetic polypeptide
  Synthetic Construct
DIQMTQSPSTLSASVGDRVTITCKSSQSLLYSSDQKNYLAWYQQKPGKAPKLLIYWASTRESGVPSRFSGSGSGTEFTLTISSLQPDDFATYYCQQYYSYPLTFGQGTKVEIK

SEQ ID NO: 1124 - protein, 113 aa, Artificial Sequence
  Description of Artificial Sequence: Synthetic polypeptide
  Synthetic Construct
DIQLTQSPSFLSASVGDRVTITCKSSQSLLYSSDQKNYLAWYQQKPGKAPKLLIYWASTRESGVPSRFSGSGSGTEFTLTISSLQPEDFATYYCQQYYSYPLTFGQGTKVEIK

SEQ ID NO: 1125 - protein, 113 aa, Artificial Sequence
  Description of Artificial Sequence: Synthetic polypeptide
  Synthetic Construct
EIVMTQSPATLSVSPGERATLSCKSSQSLLYSSDQKNYLAWYQQKPGQAPRLLIYWASTRESGIPARFSGSGSGTEFTLTISSLQSEDFAVYYCQQYYSYPLTFGQGTKVEIK

SEQ ID NO: 1126 - protein, 113 aa, Artificial Sequence
  Description of Artificial Sequence: Synthetic polypeptide
  Synthetic Construct
DIQMTQSPSSLSASVGDRVTITCKSSQSLLYSSDQKNYLAWYQQKPGKAPKLLIYWASTRESGVPSRFSGSGSGTDFTLTISSLQPEDFATYYCQQYYSYPLTFGQGTKVEIK

SEQ ID NO: 1127 - protein, 113 aa, Artificial Sequence
  Description of Artificial Sequence: Synthetic polypeptide
  Synthetic Construct
EIVLTQSPATLSLSPGERATLSCKSSQSLLYSSDQKNYLAWYQQKPGQAPRLLIYWASTRESGIPARFSGSGSGTDFTLTISSLEPEDFAVYYCQQYYSYPLTFGQGTKVEIK

SEQ ID NO: 1128 - protein, 113 aa, Artificial Sequence
  Description of Artificial Sequence: Synthetic polypeptide
  Synthetic Construct
DIQMTQSPSSLSASVGDRVTITCKSSQSLLYSSDQKNYLAWYQQKPGKAPKLLIYWASTRESGVPSRFSGSGSGTDFTFTISSLQPEDIATYYCQQYYSYPLTFGQGTKVEIK

SEQ ID NO: 1129 - protein, 113 aa, Artificial Sequence
  Description of Artificial Sequence: Synthetic polypeptide
  Synthetic Construct
EIVLTQSPGTLSLSPGERATLSCKSSQSLLYSSDQKNYLAWYQQKPGQAPRLLIYWASTRESGIPDRFSGSGSGTDFTLTISRLEPEDFAVYYCQQYYSYPLTFGQGTKVEIK

SEQ ID NO: 1130 - protein, 112 aa, Artificial Sequence
  Description of Artificial Sequence: Synthetic polypeptide
  Synthetic Construct
  MOD_RES (3)..(3): Glutamic acid or Glutamine
DVXMTQTPLSLPVSLGDQASISCRSSQTIIHSNGNTYLEWYLRKPGQSPKLLIYKVSNRFSGVPDRFSGSGSGTDFTLKISRVEGEDLGVYYCFQGSHVPYTFGGGTELEIK

SEQ ID NO: 1131 - protein, 105 aa, Artificial Sequence
  Description of Artificial Sequence: Synthetic polypeptide
  Synthetic Construct
  MOD_RES (10)..(10): Glutamic acid or Glutamine
  MOD_RES (12)..(12): Glutamic acid or Glutamine
  MOD_RES (76)..(76): Any naturally occurring amino acid
QMSQSPACLXAXVGESVTITCRASENIYSYLAWYQQKQGKSPKLVVYKAKTLAEGVPSRFSGRGSGTQFFLKINSXQREDFGSYYCQHHYGTPFTFGSGTKLEIK

SEQ ID NO: 1132 - protein, 107 aa, Artificial Sequence
  Description of Artificial Sequence: Synthetic polypeptide
  Synthetic Construct
DIQLTQSPSFLSASVGDRVTITCRASENIYSYLAWYQQKPGKAPKLLIYKAKTLAEGVPSRFSGSGSGTEFTLTISSLQPEDFATYYCQHHYGTPFTFGQGTKVEIK

SEQ ID NO: 1133 - protein, 107 aa, Artificial Sequence
  Description of Artificial Sequence: Synthetic polypeptide
  Synthetic Construct
EIVLTQSPATLSLSPGERATLSCRASENIYSYLAWYQQKPGQAPRLLIYKAKTLAEGIPARFSGSGSGTDFTLTISSLEPEDFAVYYCQHHYGTPFTFGQGTKVEIK

SEQ ID NO: 1134 - protein, 107 aa, Artificial Sequence
  Description of Artificial Sequence: Synthetic polypeptide
  Synthetic Construct
DIQMTQSPSTLSASVGDRVTITCRASENIYSYLAWYQQKPGKAPKLLIYKAKTLAEGVPSRFSGSGSGTEFTLTISSLQPDDFATYYCQHHYGTPFTFGQGTKVEIK

SEQ ID NO: 1135 - protein, 107 aa, Artificial Sequence
  Description of Artificial Sequence: Synthetic polypeptide
  Synthetic Construct
EIVMTQSPATLSVSPGERATLSCRASENIYSYLAWYQQKPGQAPRLLIYKAKTLAEGIPARFSGSGSGTEFTLTISSLQSEDFAVYYCQHHYGTPFTFGQGTKVEIK

SEQ ID NO: 1136 - protein, 107 aa, Artificial Sequence
  Description of Artificial Sequence: Synthetic polypeptide
  Synthetic Construct
DIQMTQSPSSLSASVGDRVTITCRASENIYSYLAWYQQKPGKAPKLLIYKAKTLAEGVPSRFSGSGSGTDFTLTISSLQPEDFATYYCQHHYGTPFTFGQGTKVEIK

SEQ ID NO: 1137 - protein, 107 aa, Artificial Sequence
  Description of Artificial Sequence: Synthetic polypeptide
  Synthetic Construct
DIQMTQSPSSLSASVGDRVTITCRASENIYSYLAWYQQKPGKAPKLLIYKAKTLAEGVPSRFSGSGSGTDFTFTISSLQPEDIATYYCQHHYGTPFTFGQGTKVEIK

SEQ ID NO: 1138 - protein, 107 aa, Artificial Sequence
  Description of Artificial Sequence: Synthetic polypeptide
  Synthetic Construct
EIVLTQSPGTLSLSPGERATLSCRASENIYSYLAWYQQKPGQAPRLLIYKAKTLAEGIPDRFSGSGSGTDFTLTISRLEPEDFAVYYCQHHYGTPFTFGQGTKVEIK

SEQ ID NO: 1139 - protein, 107 aa, Artificial Sequence
  Description of Artificial Sequence: Synthetic polypeptide
  Synthetic Construct
DIVMTQSPLSLPVTPGEPASISCRASENIYSYLAWYLQKPGQSPQLLIYKAKTLAEGVPDRFSGSGSGTDFTLKISRVEAEDVGVYYCQHHYGTPFTFGQGTKVEIK

SEQ ID NO: 1140 - protein, 107 aa, Artificial Sequence
  Description of Artificial Sequence: Synthetic polypeptide
  Synthetic Construct
DIVMTQSPDSLAVSLGERATINCRASENIYSYLAWYQQKPGQPPKLLIYKAKTLAEGVPDRFSGSGSGTDFTLTISSLQAEDVAVYYCQHHYGTPFTFGQGTKVEIK

SEQ ID NO: 1141 - protein, 107 aa, Artificial Sequence
  Description of Artificial Sequence: Synthetic polypeptide
  Synthetic Construct
DVVMTQSPLSLPVTLGQPASISCRASENIYSYLAWFQQRPGQSPRRLIYKAKTLAEGVPDRFSGSGSGTDFTLKISRVEAEDVGVYYCQHHYGTPFTFGQGTKVEIK

SEQ ID NO: 1142 - protein, 107 aa, Artificial Sequence
  Description of Artificial Sequence: Synthetic polypeptide
  Synthetic Construct
DIQMTQSPASLSVSVGETVTITCRTSENVYSNLAWYQQKQGKSPQLLVYAATNLADGVPSRFSASGSATQFSLKINSLQSADFGSYYCHHFWGTPYTFGGGTKLEMN

SEQ ID NO: 1143 - protein, 107 aa, Artificial Sequence
  Description of Artificial Sequence: Synthetic polypeptide
  Synthetic Construct
EIVMTQSPATLSVSPGERATLSCRTSENVYSNLAWYQQKPGQAPRLLIYAATNLADGIPARFSGSGSGTEFTLTISSLQSEDFAVYYCHHFWGTPYTFGQGTKVEIK

SEQ ID NO: 1144 - protein, 107 aa, Artificial Sequence
  Description of Artificial Sequence: Synthetic polypeptide
  Synthetic Construct
EIVLTQSPATLSLSPGERATLSCRTSENVYSNLAWYQQKPGQAPRLLIYAATNLADGIPARFSGSGSGTDFTLTISSLEPEDFAVYYCHHFWGTPYTFGQGTKVEIK

SEQ ID NO: 1145 - protein, 107 aa, Artificial Sequence
  Description of Artificial Sequence: Synthetic polypeptide
  Synthetic Construct
DIQLTQSPSFLSASVGDRVTITCRTSENVYSNLAWYQQKPGKAPKLLIYAATNLADGVPSRFSGSGSGTEFTLTISSLQPEDFATYYCHHFWGTPYTFGQGTKVEIK

SEQ ID NO: 1146 - protein, 107 aa, Artificial Sequence
  Description of Artificial Sequence: Synthetic polypeptide
  Synthetic Construct
DIQMTQSPSTLSASVGDRVTITCRTSENVYSNLAWYQQKPGKAPKLLIYAATNLADGVPSRFSGSGSGTEFTLTISSLQPDDFATYYCHHFWGTPYTFGQGTKVEIK

SEQ ID NO: 1147 - protein, 107 aa, Artificial Sequence
  Description of Artificial Sequence: Synthetic polypeptide
  Synthetic Construct
DIQMTQSPSSLSASVGDRVTITCRTSENVYSNLAWYQQKPGKAPKLLIYAATNLADGVPSRFSGSGSGTDFTLTISSLQPEDFATYYCHHFWGTPYTFGQGTKVEIK

SEQ ID NO: 1148 - protein, 107 aa, Artificial Sequence
  Description of Artificial Sequence: Synthetic polypeptide
  Synthetic Construct
DIQMTQSPSSLSASVGDRVTITCRTSENVYSNLAWYQQKPGKAPKLLIYAATNLADGVPSRFSGSGSGTDFTFTISSLQPEDIATYYCHHFWGTPYTFGQGTKVEIK

SEQ ID NO: 1149 - protein, 107 aa, Artificial Sequence
  Description of Artificial Sequence: Synthetic polypeptide
  Synthetic Construct
EIVLTQSPGTLSLSPGERATLSCRTSENVYSNLAWYQQKPGQAPRLLIYAATNLADGIPDRFSGSGSGTDFTLTISRLEPEDFAVYYCHHFWGTPYTFGQGTKVEIK

SEQ ID NO: 1150 - protein, 107 aa, Artificial Sequence
  Description of Artificial Sequence: Synthetic polypeptide
  Synthetic Construct
DIVMTQSPLSLPVTPGEPASISCRTSENVYSNLAWYLQKPGQSPQLLIYAATNLADGVPDRFSGSGSGTDFTLKISRVEAEDVGVYYCHHFWGTPYTFGQGTKVEIK

SEQ ID NO: 1151 - protein, 107 aa, Artificial Sequence
  Description of Artificial Sequence: Synthetic polypeptide
  Synthetic Construct
DVVMTQSPLSLPVTLGQPASISCRTSENVYSNLAWFQQRPGQSPRRLIYAATNLADGVPDRFSGSGSGTDFTLKISRVEAEDVGVYYCHHFWGTPYTFGQGTKVEIK

SEQ ID NO: 1152 - protein, 107 aa, Artificial Sequence
  Description of Artificial Sequence: Synthetic polypeptide
  Synthetic Construct
DIVMTQSPDSLAVSLGERATINCRTSENVYSNLAWYQQKPGQPPKLLIYAATNLADGVPDRFSGSGSGTDFTLTISSLQAEDVAVYYCHHFWGTPYTFGQGTKVEIK

SEQ ID NO: 1153 - protein, 112 aa, Artificial Sequence
  Description of Artificial Sequence: Synthetic polypeptide
  Synthetic Construct
  MOD_RES (3)..(3): Glutamic acid or Glutamine
DVXMTQNPLSLPVSLGDQASISCRSSQSLVHSNGYTYLHWYLQKPGQSPKLLIYKVSNRFSGVPDRFSGSGSGTDFTLKISRVEADDLGVYLCSQSTRVPYTFGGGTKLEIK

SEQ ID NO: 1154 - protein, 112 aa, Artificial Sequence
  Description of Artificial Sequence: Synthetic polypeptide
  Synthetic Construct
DVVMTQSPLSLPVTLGQPASISCRSSQSLVHSNGYTYLHWFQQRPGQSPRRLIYKVSNRFSGVPDRFSGSGSGTDFTLKISRVEAEDVGVYYCSQSTRVPYTFGQGTKVEIK

SEQ ID NO: 1155 - protein, 112 aa, Artificial Sequence
  Description of Artificial Sequence: Synthetic polypeptide
  Synthetic Construct
DIVMTQSPLSLPVTPGEPASISCRSSQSLVHSNGYTYLHWYLQKPGQSPQLLIYKVSNRFSGVPDRFSGSGSGTDFTLKISRVEAEDVGVYYCSQSTRVPYTFGQGTKVEIK

SEQ ID NO: 1156 - protein, 112 aa, Artificial Sequence
  Description of Artificial Sequence: Synthetic polypeptide
  Synthetic Construct
DIVMTQSPDSLAVSLGERATINCRSSQSLVHSNGYTYLHWYQQKPGQPPKLLIYKVSNRFSGVPDRFSGSGSGTDFTLTISSLQAEDVAVYYCSQSTRVPYTFGQGTKVEIK

SEQ ID NO: 1157 - protein, 112 aa, Artificial Sequence
  Description of Artificial Sequence: Synthetic polypeptide
  Synthetic Construct
EIVLTQSPATLSLSPGERATLSCRSSQSLVHSNGYTYLHWYQQKPGQAPRLLIYKVSNRFSGIPARFSGSGSGTDFTLTISSLEPEDFAVYYCSQSTRVPYTFGQGTKVEIK

SEQ ID NO: 1158 - protein, 112 aa, Artificial Sequence
  Description of Artificial Sequence: Synthetic polypeptide
  Synthetic Construct
DIQMTQSPSSLSASVGDRVTITCRSSQSLVHSNGYTYLHWYQQKPGKAPKLLIYKVSNRFSGVPSRFSGSGSGTDFTFTISSLQPEDIATYYCSQSTRVPYTFGQGTKVEIK

SEQ ID NO: 1159 - protein, 112 aa, Artificial Sequence
  Description of Artificial Sequence: Synthetic polypeptide
  Synthetic Construct
EIVMTQSPATLSVSPGERATLSCRSSQSLVHSNGYTYLHWYQQKPGQAPRLLIYKVSNRFSGIPARFSGSGSGTEFTLTISSLQSEDFAVYYCSQSTRVPYTFGQGTKVEIK

SEQ ID NO: 1160 - protein, 112 aa, Artificial Sequence
  Description of Artificial Sequence: Synthetic polypeptide
  Synthetic Construct
DIQMTQSPSTLSASVGDRVTITCRSSQSLVHSNGYTYLHWYQQKPGKAPKLLIYKVSNRFSGVPSRFSGSGSGTEFTLTISSLQPDDFATYYCSQSTRVPYTFGQGTKVEIK

SEQ ID NO: 1161 - protein, 112 aa, Artificial Sequence
  Description of Artificial Sequence: Synthetic polypeptide
  Synthetic Construct
DIQMTQSPSSLSASVGDRVTITCRSSQSLVHSNGYTYLHWYQQKPGKAPKLLIYKVSNRFSGVPSRFSGSGSGTDFTLTISSLQPEDFATYYCSQSTRVPYTFGQGTKVEIK

SEQ ID NO: 1162 - protein, 112 aa, Artificial Sequence
  Description of Artificial Sequence: Synthetic polypeptide
  Synthetic Construct
DIQLTQSPSFLSASVGDRVTITCRSSQSLVHSNGYTYLHWYQQKPGKAPKLLIYKVSNRFSGVPSRFSGSGSGTEFTLTISSLQPEDFATYYCSQSTRVPYTFGQGTKVEIK

SEQ ID NO: 1163 - protein, 112 aa, Artificial Sequence
  Description of Artificial Sequence: Synthetic polypeptide
  Synthetic Construct
EIVLTQSPGTLSLSPGERATLSCRSSQSLVHSNGYTYLHWYQQKPGQAPRLLIYKVSNRFSGIPDRFSGSGSGTDFTLTISRLEPEDFAVYYCSQSTRVPYTFGQGTKVEIK

SEQ ID NO: 1164 - protein, 112 aa, Artificial Sequence
  Description of Artificial Sequence: Synthetic polypeptide
  Synthetic Construct
DVLMTQTPLSLPVSLGDQASISCRFSQSLVHSNGNTYLHWYLQKPGQSPKLLIYKVSNRFSGVPDRFSGSGSGTDFTLRISGVEAEDLGVYFCSQSTRVPPTFGGGTKLEIK

SEQ ID NO: 1165 - protein, 112 aa, Artificial Sequence
  Description of Artificial Sequence: Synthetic polypeptide
  Synthetic Construct
DVVMTQSPLSLPVTLGQPASISCRFSQSLVHSNGNTYLHWFQQRPGQSPRRLIYKVSNRFSGVPDRFSGSGSGTDFTLKISRVEAEDVGVYYCSQSTRVPPTFGQGTKVEIK

SEQ ID NO: 1166 - protein, 112 aa, Artificial Sequence
  Description of Artificial Sequence: Synthetic polypeptide
  Synthetic Construct
DIVMTQSPLSLPVTPGEPASISCRFSQSLVHSNGNTYLHWYLQKPGQSPQLLIYKVSNRFSGVPDRFSGSGSGTDFTLKISRVEAEDVGVYYCSQSTRVPPTFGQGTKVEIK

SEQ ID NO: 1167 - protein, 112 aa, Artificial Sequence
  Description of Artificial Sequence: Synthetic polypeptide
  Synthetic Construct
DIVMTQSPDSLAVSLGERATINCRFSQSLVHSNGNTYLHWYQQKPGQPPKLLIYKVSNRFSGVPDRFSGSGSGTDFTLTISSLQAEDVAVYYCSQSTRVPPTFGQGTKVEIK

SEQ ID NO: 1168 - protein, 112 aa, Artificial Sequence
  Description of Artificial Sequence: Synthetic polypeptide
  Synthetic Construct
EIVLTQSPATLSLSPGERATLSCRFSQSLVHSNGNTYLHWYQQKPGQAPRLLIYKVSNRFSGIPARFSGSGSGTDFTLTISSLEPEDFAVYYCSQSTRVPPTFGQGTKVEIK

SEQ ID NO: 1169 - protein, 112 aa, Artificial Sequence
  Description of Artificial Sequence: Synthetic polypeptide
  Synthetic Construct
EIVMTQSPATLSVSPGERATLSCRFSQSLVHSNGNTYLHWYQQKPGQAPRLLIYKVSNRFSGIPARFSGSGSGTEFTLTISSLQSEDFAVYYCSQSTRVPPTFGQGTKVEIK

SEQ ID NO: 1170 - protein, 112 aa, Artificial Sequence
  Description of Artificial Sequence: Synthetic polypeptide
  Synthetic Construct
DIQLTQSPSFLSASVGDRVTITCRFSQSLVHSNGNTYLHWYQQKPGKAPKLLIYKVSNRFSGVPSRFSGSGSGTEFTLTISSLQPEDFATYYCSQSTRVPPTFGQGTKVEIK

SEQ ID NO: 1171 - protein, 112 aa, Artificial Sequence
  Description of Artificial Sequence: Synthetic polypeptide
  Synthetic Construct
DIQMTQSPSTLSASVGDRVTITCRFSQSLVHSNGNTYLHWYQQKPGKAPKLLIYKVSNRFSGVPSRFSGSGSGTEFTLTISSLQPDDFATYYCSQSTRVPPTFGQGTKVEIK

SEQ ID NO: 1172 - protein, 112 aa, Artificial Sequence
  Description of Artificial Sequence: Synthetic polypeptide
  Synthetic Construct
DIQMTQSPSSLSASVGDRVTITCRFSQSLVHSNGNTYLHWYQQKPGKAPKLLIYKVSNRFSGVPSRFSGSGSGTDFTLTISSLQPEDFATYYCSQSTRVPPTFGQGTKVEIK

SEQ ID NO: 1173 - protein, 112 aa, Artificial Sequence
  Description of Artificial Sequence: Synthetic polypeptide
  Synthetic Construct
DIQMTQSPSSLSASVGDRVTITCRFSQSLVHSNGNTYLHWYQQKPGKAPKLLIYKVSNRFSGVPSRFSGSGSGTDFTFTISSLQPEDIATYYCSQSTRVPPTFGQGTKVEIK

SEQ ID NO: 1174 - protein, 112 aa, Artificial Sequence
  Description of Artificial Sequence: Synthetic polypeptide
  Synthetic Construct
EIVLTQSPGTLSLSPGERATLSCRFSQSLVHSNGNTYLHWYQQKPGQAPRLLIYKVSNRFSGIPDRFSGSGSGTDFTLTISRLEPEDFAVYYCSQSTRVPPTFGQGTKVEIK

SEQ ID NO: 1175 - protein, 117 aa, Artificial Sequence
  Description of Artificial Sequence: Synthetic polypeptide
  Synthetic Construct
EVQLVESGGGLVQPKGSLKLSCAAFGFNFNTYAMKWVRQTPGKGLEWIARIRSNSNDYATNYSDSVKDRFTISRDDSESIVYVQMNNLKTEDTGMYSCVGHKINNYPFAHWGRGTLV

SEQ ID NO: 1176 - protein, 105 aa, Artificial Sequence
  Description of Artificial Sequence: Synthetic polypeptide
  Synthetic Construct
DIQMTQSPSSLSASVGDRVTITCKASSNVNYMSWYQQKPGKAPKLLIYFTSNLPSGVPSRFSGSGSGTDFTFTISSLQPEDIATYYCSGEVTQFTFGQGTKVEIK

SEQ ID NO: 1177 - protein, 105 aa, Artificial Sequence
  Description of Artificial Sequence: Synthetic polypeptide
  Synthetic Construct
DIQLTQSPSFLSASVGDRVTITCKASSNVNYMSWYQQKPGKAPKLLIYFTSNLPSGVPSRFSGSGSGTEFTLTISSLQPEDFATYYCSGEVTQFTFGQGTKVEIK

SEQ ID NO: 1178 - protein, 105 aa, Artificial Sequence
  Description of Artificial Sequence: Synthetic polypeptide
  Synthetic Construct
DIQMTQSPSSLSASVGDRVTITCKASSNVNYMSWYQQKPGKAPKLLIYFTSNLPSGVPSRFSGSGSGTDFTLTISSLQPEDFATYYCSGEVTQFTFGQGTKVEIK

SEQ ID NO: 1179 - protein, 105 aa, Artificial Sequence
  Description of Artificial Sequence: Synthetic polypeptide
  Synthetic Construct
DIQMTQSPSTLSASVGDRVTITCKASSNVNYMSWYQQKPGKAPKLLIYFTSNLPSGVPSRFSGSGSGTEFTLTISSLQPDDFATYYCSGEVTQFTFGQGTKVEIK

SEQ ID NO: 1180 - protein, 105 aa, Artificial Sequence
  Description of Artificial Sequence: Synthetic polypeptide
  Synthetic Construct
EIVMTQSPATLSVSPGERATLSCKASSNVNYMSWYQQKPGQAPRLLIYFTSNLPSGIPARFSGSGSGTEFTLTISSLQSEDFAVYYCSGEVTQFTFGQGTKVEIK

SEQ ID NO: 1181 - protein, 105 aa, Artificial Sequence
  Description of Artificial Sequence: Synthetic polypeptide
  Synthetic Construct
EIVLTQSPGTLSLSPGERATLSCKASSNVNYMSWYQQKPGQAPRLLIYFTSNLPSGIPDRFSGSGSGTDFTLTISRLEPEDFAVYYCSGEVTQFTFGQGTKVEIK

SEQ ID NO: 1182 - protein, 105 aa, Artificial Sequence
  Description of Artificial Sequence: Synthetic polypeptide
  Synthetic Construct
DIVMTQSPLSLPVTPGEPASISCKASSNVNYMSWYLQKPGQSPQLLIYFTSNLPSGVPDRFSGSGSGTDFTLKISRVEAEDVGVYYCSGEVTQFTFGQGTKVEIK

SEQ ID NO: 1183 - protein, 105 aa, Artificial Sequence
  Description of Artificial Sequence: Synthetic polypeptide
  Synthetic Construct
DVVMTQSPLSLPVTLGQPASISCKASSNVNYMSWFQQRPGQSPRRLIYFTSNLPSGVPDRFSGSGSGTDFTLKISRVEAEDVGVYYCSGEVTQFTFGQGTKVEIK

SEQ ID NO: 1184 - protein, 105 aa, Artificial Sequence
  Description of Artificial Sequence: Synthetic polypeptide
  Synthetic Construct
DIVMTQSPDSLAVSLGERATINCKASSNVNYMSWYQQKPGQPPKLLIYFTSNLPSGVPDRFSGSGSGTDFTLTISSLQAEDVAVYYCSGEVTQFTFGQGTKVEIK

SEQ ID NO: 1185 - protein, 112 aa, Artificial Sequence
  Description of Artificial Sequence: Synthetic polypeptide
  Synthetic Construct
DVVMTQTPLSLPVSLGDQASISCRSSQTIIHSNGNTYLEWYLRKPGQSPKLLIYKVSNRFCGVPDRFSGSGSGTDFTLKISRVEAEDLGVYYCFQGSHVPYTFGGGTELEIK

SEQ ID NO: 1186 - protein, 112 aa, Artificial Sequence
  Description of Artificial Sequence: Synthetic polypeptide
  Synthetic Construct
DVVMTQSPLSLPVTLGQPASISCRSSQTIIHSNGNTYLEWFQQRPGQSPRRLIYKVSNRFCGVPDRFSGSGSGTDFTLKISRVEAEDVGVYYCFQGSHVPYTFGQGTKVEIK

SEQ ID NO: 1187 - protein, 112 aa, Artificial Sequence
  Description of Artificial Sequence: Synthetic polypeptide
  Synthetic Construct
DIVMTQSPLSLPVTPGEPASISCRSSQTIIHSNGNTYLEWYLQKPGQSPQLLIYKVSNRFCGVPDRFSGSGSGTDFTLKISRVEAEDVGVYYCFQGSHVPYTFGQGTKVEIK

SEQ ID NO: 1188 - protein, 112 aa, Artificial Sequence
  Description of Artificial Sequence: Synthetic polypeptide
  Synthetic Construct
DIVMTQSPDSLAVSLGERATINCRSSQTIIHSNGNTYLEWYQQKPGQPPKLLIYKVSNRFCGVPDRFSGSGSGTDFTLTISSLQAEDVAVYYCFQGSHVPYTFGQGTKVEIK

SEQ ID NO: 1189 - protein, 112 aa, Artificial Sequence
  Description of Artificial Sequence: Synthetic polypeptide
  Synthetic Construct
EIVLTQSPATLSLSPGERATLSCRSSQTIIHSNGNTYLEWYQQKPGQAPRLLIYKVSNRFCGIPARFSGSGSGTDFTLTISSLEPEDFAVYYCFQGSHVPYTFGQGTKVEIK

SEQ ID NO: 1190 - protein, 112 aa, Artificial Sequence
  Description of Artificial Sequence: Synthetic polypeptide
  Synthetic Construct
EIVMTQSPATLSVSPGERATLSCRSSQTIIHSNGNTYLEWYQQKPGQAPRLLIYKVSNRFCGIPARFSGSGSGTEFTLTISSLQSEDFAVYYCFQGSHVPYTFGQGTKVEIK

SEQ ID NO: 1191 - protein, 112 aa, Artificial Sequence
  Description of Artificial Sequence: Synthetic polypeptide
  Synthetic Construct
DIQMTQSPSSLSASVGDRVTITCRSSQTIIHSNGNTYLEWYQQKPGKAPKLLIYKVSNRFCGVPSRFSGSGSGTDFTFTISSLQPEDIATYYCFQGSHVPYTFGQGTKVEIK

SEQ ID NO: 1192 - protein, 112 aa, Artificial Sequence
  Description of Artificial Sequence: Synthetic polypeptide
  Synthetic Construct
EIVLTQSPGTLSLSPGERATLSCRSSQTIIHSNGNTYLEWYQQKPGQAPRLLIYKVSNRFCGIPDRFSGSGSGTDFTLTISRLEPEDFAVYYCFQGSHVPYTFGQGTKVEIK

SEQ ID NO: 1193 - protein, 112 aa, Artificial Sequence
  Description of Artificial Sequence: Synthetic polypeptide
  Synthetic Construct
DIQLTQSPSFLSASVGDRVTITCRSSQTIIHSNGNTYLEWYQQKPGKAPKLLIYKVSNRFCGVPSRFSGSGSGTEFTLTISSLQPEDFATYYCFQGSHVPYTFGQGTKVEIK

SEQ ID NO: 1194 - protein, 112 aa, Artificial Sequence
  Description of Artificial Sequence: Synthetic polypeptide
  Synthetic Construct
DIQMTQSPSTLSASVGDRVTITCRSSQTIIHSNGNTYLEWYQQKPGKAPKLLIYKVSNRFCGVPSRFSGSGSGTEFTLTISSLQPDDFATYYCFQGSHVPYTFGQGTKVEIK

SEQ ID NO: 1195 - protein, 112 aa, Artificial Sequence
  Description of Artificial Sequence: Synthetic polypeptide
  Synthetic Construct
DIQMTQSPSSLSASVGDRVTITCRSSQTIIHSNGNTYLEWYQQKPGKAPKLLIYKVSNRFCGVPSRFSGSGSGTDFTLTISSLQPEDFATYYCFQGSHVPYTFGQGTKVEIK

SEQ ID NO: 1196 - protein, 113 aa, Artificial Sequence
  Description of Artificial Sequence: Synthetic polypeptide
  Synthetic Construct
  MOD_RES (3)..(3): Glutamic acid or Glutamine
  MOD_RES (50)..(50): Glutamic acid or Glutamine
  MOD_RES (73)..(73): Any naturally occurring amino acid
DIXMTQSPSSLTVTAGEKVTMSCKSSQSLLNSGNQKKYLTWYQQKPGQPXKLLIYWASTRESGVRDRFTGSGXGTDFTLTISSVQGEDLAIYYCQNDYGFPLTFGGGTKLEMK

SEQ ID NO: 1197 - protein, 113 aa, Artificial Sequence
  Description of Artificial Sequence: Synthetic polypeptide
  Synthetic Construct
DIVMTQSPDSLAVSLGERATINCKSSQSLLNSGNQKKYLTWYQQKPGQPPKLLIYWASTRESGVPDRFSGSGSGTDFTLTISSLQAEDVAVYYCQNDYGFPLTFGQGTKVEIK

SEQ ID NO: 1198 - protein, 113 aa, Artificial Sequence
  Description of Artificial Sequence: Synthetic polypeptide
  Synthetic Construct
DVVMTQSPLSLPVTLGQPASISCKSSQSLLNSGNQKKYLTWFQQRPGQSPRRLIYWASTRESGVPDRFSGSGSGTDFTLKISRVEAEDVGVYYCQNDYGFPLTFGQGTKVEIK

SEQ ID NO: 1199 - protein, 113 aa, Artificial Sequence
  Description of Artificial Sequence: Synthetic polypeptide
  Synthetic Construct
DIVMTQSPLSLPVTPGEPASISCKSSQSLLNSGNQKKYLTWYLQKPGQSPQLLIYWASTRESGVPDRFSGSGSGTDFTLKISRVEAEDVGVYYCQNDYGFPLTFGQGTKVEIK

SEQ ID NO: 1200 - protein, 113 aa, Artificial Sequence
  Description of Artificial Sequence: Synthetic polypeptide
  Synthetic Construct
DIQMTQSPSSLSASVGDRVTITCKSSQSLLNSGNQKKYLTWYQQKPGKAPKLLIYWASTRESGVPSRFSGSGSGTDFTFTISSLQPEDIATYYCQNDYGFPLTFGQGTKVEIK

SEQ ID NO: 1201 - protein, 113 aa, Artificial Sequence
  Description of Artificial Sequence: Synthetic polypeptide
  Synthetic Construct
EIVLTQSPATLSLSPGERATLSCKSSQSLLNSGNQKKYLTWYQQKPGQAPRLLIYWASTRESGIPARFSGSGSGTDFTLTISSLEPEDFAVYYCQNDYGFPLTFGQGTKVEIK

SEQ ID NO: 1202 - protein, 113 aa, Artificial Sequence
  Description of Artificial Sequence: Synthetic polypeptide
  Synthetic Construct
EIVMTQSPATLSVSPGERATLSCKSSQSLLNSGNQKKYLTWYQQKPGQAPRLLIYWASTRESGIPARFSGSGSGTEFTLTISSLQSEDFAVYYCQNDYGFPLTFGQGTKVEIK

SEQ ID NO: 1203 - protein, 113 aa, Artificial Sequence
  Description of Artificial Sequence: Synthetic polypeptide
  Synthetic Construct
DIQMTQSPSTLSASVGDRVTITCKSSQSLLNSGNQKKYLTWYQQKPGKAPKLLIYWASTRESGVPSRFSGSGSGTEFTLTISSLQPDDFATYYCQNDYGFPLTFGQGTKVEIK

SEQ ID NO: 1204 - protein, 113 aa, Artificial Sequence
  Description of Artificial Sequence: Synthetic polypeptide
  Synthetic Construct
EIVLTQSPGTLSLSPGERATLSCKSSQSLLNSGNQKKYLTWYQQKPGQAPRLLIYWASTRESGIPDRFSGSGSGTDFTLTISRLEPEDFAVYYCQNDYGFPLTFGQGTKVEIK

SEQ ID NO: 1205 - protein, 113 aa, Artificial Sequence
  Description of Artificial Sequence: Synthetic polypeptide
  Synthetic Construct
DIQLTQSPSFLSASVGDRVTITCKSSQSLLNSGNQKKYLTWYQQKPGKAPKLLIYWASTRESGVPSRFSGSGSGTEFTLTISSLQPEDFATYYCQNDYGFPLTFGQGTKVEIK

SEQ ID NO: 1206 - protein, 113 aa, Artificial Sequence
  Description of Artificial Sequence: Synthetic polypeptide
  Synthetic Construct
DIQMTQSPSSLSASVGDRVTITCKSSQSLLNSGNQKKYLTWYQQKPGKAPKLLIYWASTRESGVPSRFSGSGSGTDFTLTISSLQPEDFATYYCQNDYGFPLTFGQGTKVEIK

SEQ ID NO: 1207 - protein, 109 aa, Artificial Sequence
  Description of Artificial Sequence: Synthetic polypeptide
  Synthetic Construct
TQSPSSLAVSVGEKVTMTCKSSQSLLYSGNQKNFLAWYQQKPGQSPKLLIYWASTRESGVPDRFTGSGSGTDFTLTISTVKAEDLAVYYCQQYYSYPFTFGSGTKLEIK

SEQ ID NO: 1208 - protein, 113 aa, Artificial Sequence
  Description of Artificial Sequence: Synthetic polypeptide
  Synthetic Construct
DIVMTQSPDSLAVSLGERATINCKSSQSLLYSGNQKNFLAWYQQKPGQPPKLLIYWASTRESGVPDRFSGSGSGTDFTLTISSLQAEDVAVYYCQQYYSYPFTFGQGTKVEIK

SEQ ID NO: 1209 - protein, 113 aa, Artificial Sequence
  Description of Artificial Sequence: Synthetic polypeptide
  Synthetic Construct
DIVMTQSPLSLPVTPGEPASISCKSSQSLLYSGNQKNFLAWYLQKPGQSPQLLIYWASTRESGVPDRFSGSGSGTDFTLKISRVEAEDVGVYYCQQYYSYPFTFGQGTKVEIK

SEQ ID NO: 1210 - protein, 113 aa, Artificial Sequence
  Description of Artificial Sequence: Synthetic polypeptide
  Synthetic Construct
DVVMTQSPLSLPVTLGQPASISCKSSQSLLYSGNQKNFLAWFQQRPGQSPRRLIYWASTRESGVPDRFSGSGSGTDFTLKISRVEAEDVGVYYCQQYYSYPFTFGQGTKVEIK

SEQ ID NO: 1211 - protein, 113 aa, Artificial Sequence
  Description of Artificial Sequence: Synthetic polypeptide
  Synthetic Construct
DIQLTQSPSFLSASVGDRVTITCKSSQSLLYSGNQKNFLAWYQQKPGKAPKLLIYWASTRESGVPSRFSGSGSGTEFTLTISSLQPEDFATYYCQQYYSYPFTFGQGTKVEIK

SEQ ID NO: 1212 - protein, 113 aa, Artificial Sequence
  Description of Artificial Sequence: Synthetic polypeptide
  Synthetic Construct
DIQMTQSPSTLSASVGDRVTITCKSSQSLLYSGNQKNFLAWYQQKPGKAPKLLIYWASTRESGVPSRFSGSGSGTEFTLTISSLQPDDFATYYCQQYYSYPFTFGQGTKVEIK

SEQ ID NO: 1213 - protein, 113 aa, Artificial Sequence
  Description of Artificial Sequence: Synthetic polypeptide
  Synthetic Construct
EIVMTQSPATLSVSPGERATLSCKSSQSLLYSGNQKNFLAWYQQKPGQAPRLLIYWASTRESGIPARFSGSGSGTEFTLTISSLQSEDFAVYYCQQYYSYPFTFGQGTKVEIK

SEQ ID NO: 1214 - protein, 113 aa, Artificial Sequence
  Description of Artificial Sequence: Synthetic polypeptide
  Synthetic Construct
DIQMTQSPSSLSASVGDRVTITCKSSQSLLYSGNQKNFLAWYQQKPGKAPKLLIYWASTRESGVPSRFSGSGSGTDFTFTISSLQPEDIATYYCQQYYSYPFTFGQGTKVEIK

SEQ ID NO: 1215 - protein, 113 aa, Artificial Sequence
  Description of Artificial Sequence: Synthetic polypeptide
  Synthetic Construct
EIVLTQSPATLSLSPGERATLSCKSSQSLLYSGNQKNFLAWYQQKPGQAPRLLIYWASTRESGIPARFSGSGSGTDFTLTISSLEPEDFAVYYCQQYYSYPFTFGQGTKVEIK

SEQ ID NO: 1216 - protein, 113 aa, Artificial Sequence
  Description of Artificial Sequence: Synthetic polypeptide
  Synthetic Construct
DIQMTQSPSSLSASVGDRVTITCKSSQSLLYSGNQKNFLAWYQQKPGKAPKLLIYWASTRESGVPSRFSGSGSGTDFTLTISSLQPEDFATYYCQQYYSYPFTFGQGTKVEIK

SEQ ID NO: 1217 - protein, 113 aa, Artificial Sequence
  Description of Artificial Sequence: Synthetic polypeptide
  Synthetic Construct
EIVLTQSPGTLSLSPGERATLSCKSSQSLLYSGNQKNFLAWYQQKPGQAPRLLIYWASTRESGIPDRFSGSGSGTDFTLTISRLEPEDFAVYYCQQYYSYPFTFGQGTKVEIK

SEQ ID NO: 1218 - protein, 111 aa, Artificial Sequence
  Description of Artificial Sequence: Synthetic polypeptide
  Synthetic Construct
TMSQSPSSLAVSVGEKVTMSCKSSQSLLYSSDQKNYLAWYQQKPGQSPKLLIYWASTRESGVPDRFTGSGSGTDFTLTISSVKAEDLAVYCCQQYYSYPLTFGAGTKLELK

SEQ ID NO: 1219 - protein, 119 aa, Artificial Sequence
  Description of Artificial Sequence: Synthetic polypeptide
  Synthetic Construct
EVKLVESGGGLVKPGGSLKLSCAASGFTLSSYAMSWVRQTPEKRLEWVASISRGGSTYYPDSVQGRFTFSRDNARNILYLQMSSLRSEDTAMYYCTRGYGYYRTPFANWGQGTLVTVSA

SEQ ID NO: 1220 - protein, 119 aa, Artificial Sequence
  Description of Artificial Sequence: Synthetic polypeptide
  Synthetic Construct
QVQLQESGPGLVKPSETLSLTCTVSGFTLSSYAMSWIRQPPGKGLEWVASISRGGSTYYPPSLKSRVTISVDTSKNQFSLKLSSVTAADTAVYYCTRGYGYYRTPFANWGQGTLVTVSS

SEQ ID NO: 1221 - protein, 119 aa, Artificial Sequence
  Description of Artificial Sequence: Synthetic polypeptide
  Synthetic Construct
EVQLLESGGGLVQPGGSLRLSCAASGFTLSSYAMSWVRQAPGKGLEWVASISRGGSTYYPDSVKGRFTISRDNSKNTLYLQMNSLRAEDTAVYYCTRGYGYYRTPFANWGQGTLVTVSS

SEQ ID NO: 1222 - protein, 119 aa, Artificial Sequence
  Description of Artificial Sequence: Synthetic polypeptide
  Synthetic Construct
EVQLVESGGGLVQPGGSLRLSCAASGFTLSSYAMSWVRQAPGKGLEWVASISRGGSTYYPDSVKGRFTISRDNAKNSLYLQMNSLRAEDTAVYYCTRGYGYYRTPFANWGQGTLVTVSS

SEQ ID NO: 1223 - protein, 119 aa, Artificial Sequence
  Description of Artificial Sequence: Synthetic polypeptide
  Synthetic Construct
QVQLVESGGGVVQPGRSLRLSCAASGFTLSSYAMSWVRQAPGKGLEWVASISRGGSTYYPDSVKGRFTISRDNSKNTLYLQMNSLRAEDTAVYYCTRGYGYYRTPFANWGQGTLVTVSS

SEQ ID NO: 1224 - protein, 119 aa, Artificial Sequence
  Description of Artificial Sequence: Synthetic polypeptide
  Synthetic Construct
QVQLVQSGAEVKKPGSSVKVSCKASGFTLSSYAMSWVRQAPGQGLEWVASISRGGSTYYPQKFQGRVTITADESTSTAYMELSSLRSEDTAVYYCTRGYGYYRTPFANWGQGTLVTVSS

SEQ ID NO: 1225 - protein, 119 aa, Artificial Sequence
  Description of Artificial Sequence: Synthetic polypeptide
  Synthetic Construct
QVQLVQSGAEVKKPGASVKVSCKASGFTLSSYAMSWVRQAPGQGLEWVASISRGGSTYYPQKFQGRVTMTRDTSTSTVYMELSSLRSEDTAVYYCTRGYGYYRTPFANWGQGTLVTVSS

SEQ ID NO: 1226 - protein, 119 aa, Artificial Sequence
  Description of Artificial Sequence: Synthetic polypeptide
  Synthetic Construct
EVQLVQSGAEVKKPGESLKISCKGSGFTLSSYAMSWVRQMPGKGLEWVASISRGGSTYYPPSFQGQVTISADKSISTAYLQWSSLKASDTAMYYCTRGYGYYRTPFANWGQGTLVTVSS

SEQ ID NO: 1227 - protein, 119 aa, Artificial Sequence
  Description of Artificial Sequence: Synthetic polypeptide
  Synthetic Construct
QLQLQESGPGLVKPSETLSLTCTVSGFTLSSYAMSWIRQPPGKGLEWVASISRGGSTYYPPSLKSRVTISVDTSKNQFSLKLSSVTAADTAVYYCTRGYGYYRTPFANWGQGTLVTVSS

SEQ ID NO: 1228 - protein, 119 aa, Artificial Sequence
  Description of Artificial Sequence: Synthetic polypeptide
  Synthetic Construct
QVQLQESGPGLVKPSQTLSLTCTVSGFTLSSYAMSWIRQPPGKGLEWVASISRGGSTYYPPSLKSRVTISVDTSKNQFSLKLSSVTAADTAVYYCTRGYGYYRTPFANWGQGTLVTVSS

SEQ ID NO: 1229 - protein, 119 aa, Artificial Sequence
  Description of Artificial Sequence: Synthetic polypeptide
  Synthetic Construct
EVQLQQSGPELVKPGTSVKISCKTSGYTFTEYTMHWVKQSHGKSLEWIGGINPNNGGTSYSQKFKGKASLTVDKSSSTAYMELHSLASDDSAVYYCARGGSHYYAMDYWGQGTSVTVSS

SEQ ID NO: 1230 - protein, 119 aa, Artificial Sequence
  Description of Artificial Sequence: Synthetic polypeptide
  Synthetic Construct
QVQLVQSGAEVKKPGASVKVSCKASGYTFTEYTMHWVRQAPGQGLEWIGGINPNNGGTSYSQKFQGRVTMTRDTSTSTVYMELSSLRSEDTAVYYCARGGSHYYAMDYWGQGTLVTVSS

SEQ ID NO: 1231 - protein, 119 aa, Artificial Sequence
  Description of Artificial Sequence: Synthetic polypeptide
  Synthetic Construct
EVQLVQSGAEVKKPGESLKISCKGSGYTFTEYTMHWVRQMPGKGLEWIGGINPNNGGTSYSPSFQGQVTISADKSISTAYLQWSSLKASDTAMYYCARGGSHYYAMDYWGQGTLVTVSS

SEQ ID NO: 1232 - protein, 119 aa, Artificial Sequence
  Description of Artificial Sequence: Synthetic polypeptide
  Synthetic Construct
QVQLVQSGAEVKKPGSSVKVSCKASGYTFTEYTMHWVRQAPGQGLEWIGGINPNNGGTSYSQKFQGRVTITADESTSTAYMELSSLRSEDTAVYYCARGGSHYYAMDYWGQGTLVTVSS

SEQ ID NO: 1233 - protein, 119 aa, Artificial Sequence
  Description of Artificial Sequence: Synthetic polypeptide
  Synthetic Construct
EVQLLESGGGLVQPGGSLRLSCAASGYTFTEYTMHWVRQAPGKGLEWIGGINPNNGGTSYSDSVKGRFTISRDNSKNTLYLQMNSLRAEDTAVYYCARGGSHYYAMDYWGQGTLVTVSS

SEQ ID NO: 1234 - protein, 119 aa, Artificial Sequence
  Description of Artificial Sequence: Synthetic polypeptide
  Synthetic Construct
QVQLVESGGGVVQPGRSLRLSCAASGYTFTEYTMHWVRQAPGKGLEWIGGINPNNGGTSYSDSVKGRFTISRDNSKNTLYLQMNSLRAEDTAVYYCARGGSHYYAMDYWGQGTLVTVSS

SEQ ID NO: 1235 - protein, 119 aa, Artificial Sequence
  Description of Artificial Sequence: Synthetic polypeptide
  Synthetic Construct
EVQLVESGGGLVQPGGSLRLSCAASGYTFTEYTMHWVRQAPGKGLEWIGGINPNNGGTSYSDSVKGRFTISRDNAKNSLYLQMNSLRAEDTAVYYCARGGSHYYAMDYWGQGTLVTVSS

SEQ ID NO: 1236 - protein, 119 aa, Artificial Sequence
  Description of Artificial Sequence: Synthetic polypeptide
  Synthetic Construct
QVQLQESGPGLVKPSETLSLTCTVSGYTFTEYTMHWIRQPPGKGLEWIGGINPNNGGTSYSPSLKSRVTISVDTSKNQFSLKLSSVTAADTAVYYCARGGSHYYAMDYWGQGTLVTVSS

SEQ ID NO: 1237 - protein, 119 aa, Artificial Sequence
  Description of Artificial Sequence: Synthetic polypeptide
  Synthetic Construct
EVQLVESGGGLVKPGGSLRLSCAASGYTFTEYTMHWVRQAPGKGLEWIGGINPNNGGTSYSAPVKGRFTISRDDSKNTLYLQMNSLKTEDTAVYYCARGGSHYYAMDYWGQGTLVTVSS

SEQ ID NO: 1238 - protein, 119 aa, Artificial Sequence
  Description of Artificial Sequence: Synthetic polypeptide
  Synthetic Construct
QLQLQESGPGLVKPSETLSLTCTVSGYTFTEYTMHWIRQPPGKGLEWIGGINPNNGGTSYSPSLKSRVTISVDTSKNQFSLKLSSVTAADTAVYYCARGGSHYYAMDYWGQGTLVTVSS

SEQ ID NO: 1239 - protein, 125 aa, Artificial Sequence
  Description of Artificial Sequence: Synthetic polypeptide
  Synthetic Construct
QVQLQQSGAELVRPGASVTLSCKASGYTFTDYEMHWVKQTPVHGLEWIGVIDPETGGTAYNQKFKGKAILTADKSSSTAYMELRSLTSEDSAVYYCTSPDYYGSSYPLYYAMDYWGQGTSVTVSS

SEQ ID NO: 1240 - protein, 125 aa, Artificial Sequence
  Description of Artificial Sequence: Synthetic polypeptide
  Synthetic Construct
QVQLVQSGAEVKKPGASVKVSCKASGYTFTDYEMHWVRQAPGQGLEWIGVIDPETGGTAYNQKFQGRVTMTRDTSTSTVYMELSSLRSEDTAVYYCTSPDYYGSSYPLYYAMDYWGQGTLVTVSS

SEQ ID NO: 1241 - protein, 125 aa, Artificial Sequence
  Description of Artificial Sequence: Synthetic polypeptide
  Synthetic Construct
EVQLVQSGAEVKKPGESLKISCKGSGYTFTDYEMHWVRQMPGKGLEWIGVIDPETGGTAYNPSFQGQVTISADKSISTAYLQWSSLKASDTAMYYCTSPDYYGSSYPLYYAMDYWGQGTLVTVSS

SEQ ID NO: 1242 - protein, 125 aa, Artificial Sequence
  Description of Artificial Sequence: Synthetic polypeptide
  Synthetic Construct
QVQLVESGGGVVQPGRSLRLSCAASGYTFTDYEMHWVRQAPGKGLEWIGVIDPETGGTAYNDSVKGRFTISRDNSKNTLYLQMNSLRAEDTAVYYCTSPDYYGSSYPLYYAMDYWGQGTLVTVSS

SEQ ID NO: 1243 - protein, 125 aa, Artificial Sequence
  Description of Artificial Sequence: Synthetic polypeptide
  Synthetic Construct
EVQLLESGGGLVQPGGSLRLSCAASGYTFTDYEMHWVRQAPGKGLEWIGVIDPETGGTAYNDSVKGRFTISRDNSKNTLYLQMNSLRAEDTAVYYCTSPDYYGSSYPLYYAMDYWGQGTLVTVSS

SEQ ID NO: 1244 - protein, 125 aa, Artificial Sequence
  Description of Artificial Sequence: Synthetic polypeptide
  Synthetic Construct
QVQLVQSGAEVKKPGSSVKVSCKASGYTFTDYEMHWVRQAPGQGLEWIGVIDPETGGTAYNQKFQGRVTITADESTSTAYMELSSLRSEDTAVYYCTSPDYYGSSYPLYYAMDYWGQGTLVTVSS

SEQ ID NO: 1245 - protein, 125 aa, Artificial Sequence
  Description of Artificial Sequence: Synthetic polypeptide
  Synthetic Construct
EVQLVESGGGLVQPGGSLRLSCAASGYTFTDYEMHWVRQAPGKGLEWIGVIDPETGGTAYNDSVKGRFTISRDNAKNSLYLQMNSLRAEDTAVYYCTSPDYYGSSYPLYYAMDYWGQGTLVTVSS

SEQ ID NO: 1246 - protein, 125 aa, Artificial Sequence
  Description of Artificial Sequence: Synthetic polypeptide
  Synthetic Construct
QVQLQESGPGLVKPSETLSLTCTVSGYTFTDYEMHWIRQPPGKGLEWIGVIDPETGGTAYNPSLKSRVTISVDTSKNQFSLKLSSVTAADTAVYYCTSPDYYGSSYPLYYAMDYWGQGTLVTVSS

SEQ ID NO: 1247 - protein, 125 aa, Artificial Sequence
  Description of Artificial Sequence: Synthetic polypeptide
  Synthetic Construct
EVQLVESGGGLVKPGGSLRLSCAASGYTFTDYEMHWVRQAPGKGLEWIGVIDPETGGTAYNAPVKGRFTISRDDSKNTLYLQMNSLKTEDTAVYYCTSPDYYGSSYPLYYAMDYWGQGTLVTVSS

SEQ ID NO: 1248 - protein, 125 aa, Artificial Sequence
  Description of Artificial Sequence: Synthetic polypeptide
  Synthetic Construct
QLQLQESGPGLVKPSETLSLTCTVSGYTFTDYEMHWIRQPPGKGLEWIGVIDPETGGTAYNPSLKSRVTISVDTSKNQFSLKLSSVTAADTAVYYCTSPDYYGSSYPLYYAMDYWGQGTLVTVSS

SEQ ID NO: 1249 - protein, 116 aa, Artificial Sequence
  Description of Artificial Sequence: Synthetic polypeptide
  Synthetic Construct
EVKLEESGGGLVQPGGSMKLSCAASGFTFSDAWMGWVRQSPEKGLEWVAEIRDKVKNHATYYAESVKGRFTISRDDSKSTVYLQMNTLRADDTGIYYCRLGVFDYWGQGTTLTVSS

SEQ ID NO: 1250 - protein, 116 aa, Artificial Sequence
  Description of Artificial Sequence: Synthetic polypeptide
  Synthetic Construct
EVQLVESGGGLVKPGGSLRLSCAASGFTFSDAWMGWVRQAPGKGLEWVAEIRDKVKNHATYYAAPVKGRFTISRDDSKNTLYLQMNSLKTEDTAVYYCRLGVFDYWGQGTLVTVSS

SEQ ID NO: 1251 - protein, 116 aa, Artificial Sequence
  Description of Artificial Sequence: Synthetic polypeptide
  Synthetic Construct
EVQLVESGGGLVQPGGSLRLSCAASGFTFSDAWMGWVRQAPGKGLEWVAEIRDKVKNHATYYADSVKGRFTISRDNAKNSLYLQMNSLRAEDTAVYYCRLGVFDYWGQGTLVTVSS

SEQ ID NO: 1252 - protein, 116 aa, Artificial Sequence
  Description of Artificial Sequence: Synthetic polypeptide
  Synthetic Construct
EVQLLESGGGLVQPGGSLRLSCAASGFTFSDAWMGWVRQAPGKGLEWVAEIRDKVKNHATYYADSVKGRFTISRDNSKNTLYLQMNSLRAEDTAVYYCRLGVFDYWGQGTLVTVSS

SEQ ID NO: 1253 - protein, 116 aa, Artificial Sequence
  Description of Artificial Sequence: Synthetic polypeptide
  Synthetic Construct
QVQLVESGGGVVQPGRSLRLSCAASGFTFSDAWMGWVRQAPGKGLEWVAEIRDKVKNHATYYADSVKGRFTISRDNSKNTLYLQMNSLRAEDTAVYYCRLGVFDYWGQGTLVTVSS

SEQ ID NO: 1254 - protein, 116 aa, Artificial Sequence
  Description of Artificial Sequence: Synthetic polypeptide
  Synthetic Construct
QVQLVQSGAEVKKPGSSVKVSCKASGFTFSDAWMGWVRQAPGQGLEWVAEIRDKVKNHATYYAQKFQGRVTITADESTSTAYMELSSLRSEDTAVYYCRLGVFDYWGQGTLVTVSS

SEQ ID NO: 1255 - protein, 116 aa, Artificial Sequence
  Description of Artificial Sequence: Synthetic polypeptide
  Synthetic Construct
QVQLVQSGAEVKKPGASVKVSCKASGFTFSDAWMGWVRQAPGQGLEWVAEIRDKVKNHATYYAQKFQGRVTMTRDTSTSTVYMELSSLRSEDTAVYYCRLGVFDYWGQGTLVTVSS

SEQ ID NO: 1256 - protein, 116 aa, Artificial Sequence
  Description of Artificial Sequence: Synthetic polypeptide
  Synthetic Construct
EVQLVQSGAEVKKPGESLKISCKGSGFTFSDAWMGWVRQMPGKGLEWVAEIRDKVKNHATYYAPSFQGQVTISADKSISTAYLQWSSLKASDTAMYYCRLGVFDYWGQGTLVTVSS

SEQ ID NO: 1257 - protein, 116 aa, Artificial Sequence
  Description of Artificial Sequence: Synthetic polypeptide
  Synthetic Construct
QVQLQESGPGLVKPSETLSLTCTVSGFTFSDAWMGWIRQPPGKGLEWVAEIRDKVKNHATYYAPSLKSRVTISVDTSKNQFSLKLSSVTAADTAVYYCRLGVFDYWGQGTLVTVSS

SEQ ID NO: 1258 - protein, 116 aa, Artificial Sequence
  Description of Artificial Sequence: Synthetic polypeptide
  Synthetic Construct
QLQLQESGPGLVKPSETLSLTCTVSGFTFSDAWMGWIRQPPGKGLEWVAEIRDKVKNHATYYAPSLKSRVTISVDTSKNQFSLKLSSVTAADTAVYYCRLGVFDYWGQGTLVTVSS

SEQ ID NO: 1259 - protein, 122 aa, Artificial Sequence
  Description of Artificial Sequence: Synthetic polypeptide
  Synthetic Construct
EVQLVESGGGLVQPKGSLKLSCAASGFSFNTYAMNWVRQAPGKGLEWIARIRSKSNNYATYYADSVKDRITCSRDDSENMFYLQLSSLKTEDTAMYYCVRHGDGNLWYIDVWGTGTTVTVST

SEQ ID NO: 1260 - protein, 122 aa, Artificial Sequence
  Description of Artificial Sequence: Synthetic polypeptide
  Synthetic Construct
EVQLVESGGGLVKPGGSLRLSCAASGFSFNTYAMNWVRQAPGKGLEWIARIRSKSNNYATYYAAPVKGRFTISRDDSKNTLYLQMNSLKTEDTAVYYCVRHGDGNLWYIDVWGQGTLVTVSS

SEQ ID NO: 1261 - protein, 122 aa, Artificial Sequence
  Description of Artificial Sequence: Synthetic polypeptide
  Synthetic Construct
EVQLVESGGGLVQPGGSLRLSCAASGFSFNTYAMNWVRQAPGKGLEWIARIRSKSNNYATYYADSVKGRFTISRDNAKNSLYLQMNSLRAEDTAVYYCVRHGDGNLWYIDVWGQGTLVTVSS

SEQ ID NO: 1262 - protein, 122 aa, Artificial Sequence
  Description of Artificial Sequence: Synthetic polypeptide
  Synthetic Construct
EVQLLESGGGLVQPGGSLRLSCAASGFSFNTYAMNWVRQAPGKGLEWIARIRSKSNNYATYYADSVKGRFTISRDNSKNTLYLQMNSLRAEDTAVYYCVRHGDGNLWYIDVWGQGTLVTVSS

SEQ ID NO: 1263 - protein, 122 aa, Artificial Sequence
  Description of Artificial Sequence: Synthetic polypeptide
  Synthetic Construct
QVQLVESGGGVVQPGRSLRLSCAASGFSFNTYAMNWVRQAPGKGLEWIARIRSKSNNYATYYADSVKGRFTISRDNSKNTLYLQMNSLRAEDTAVYYCVRHGDGNLWYIDVWGQGTLVTVSS

SEQ ID NO: 1264 - protein, 122 aa, Artificial Sequence
  Description of Artificial Sequence: Synthetic polypeptide
  Synthetic Construct
QVQLVQSGAEVKKPGSSVKVSCKASGFSFNTYAMNWVRQAPGQGLEWIARIRSKSNNYATYYAQKFQGRVTITADESTSTAYMELSSLRSEDTAVYYCVRHGDGNLWYIDVWGQGTLVTVSS

SEQ ID NO: 1265 - protein, 122 aa, Artificial Sequence
  Description of Artificial Sequence: Synthetic polypeptide
  Synthetic Construct
EVQLVQSGAEVKKPGESLKISCKGSGFSFNTYAMNWVRQMPGKGLEWIARIRSKSNNYATYYAPSFQGQVTISADKSISTAYLQWSSLKASDTAMYYCVRHGDGNLWYIDVWGQGTLVTVSS

SEQ ID NO: 1266 - protein, 122 aa, Artificial Sequence
  Description of Artificial Sequence: Synthetic polypeptide
  Synthetic Construct
QVQLVQSGAEVKKPGASVKVSCKASGFSFNTYAMNWVRQAPGQGLEWIARIRSKSNNYATYYAQKFQGRVTMTRDTSTSTVYMELSSLRSEDTAVYYCVRHGDGNLWYIDVWGQGTLVTVSS

SEQ ID NO: 1267 - protein, 122 aa, Artificial Sequence
  Description of Artificial Sequence: Synthetic polypeptide
  Synthetic Construct
QVQLQESGPGLVKPSETLSLTCTVSGFSFNTYAMNWIRQPPGKGLEWIARIRSKSNNYATYYAPSLKSRVTISVDTSKNQFSLKLSSVTAADTAVYYCVRHGDGNLWYIDVWGQGTLVTVSS

SEQ ID NO: 1268 - protein, 122 aa, Artificial Sequence
  Description of Artificial Sequence: Synthetic polypeptide
  Synthetic Construct
QVQLQESGPGLVKPSQTLSLTCTVSGFSFNTYAMNWIRQPPGKGLEWIARIRSKSNNYATYYAPSLKSRVTISVDTSKNQFSLKLSSVTAADTAVYYCVRHGDGNLWYIDVWGQGTLVTVSS

SEQ ID NO: 1269 - protein, 116 aa, Artificial Sequence
  Description of Artificial Sequence: Synthetic polypeptide
  Synthetic Construct
QVQLQQSGAELVKPGASVKLSCKASGYTVSRYWMHWVKQRPGRGLEWIGRIDPNSGGTKYNEKFKTKATLTVDKPSSTAYMQVSSLTSEDSAVYYCVLTGTDFDYWGQGTTLTVSS

SEQ ID NO: 1270 - protein, 116 aa, Artificial Sequence
  Description of Artificial Sequence: Synthetic polypeptide
  Synthetic Construct
QVQLVQSGAEVKKPGASVKVSCKASGYTVSRYWMHWVRQAPGQGLEWIGRIDPNSGGTKYNQKFQGRVTMTRDTSTSTVYMELSSLRSEDTAVYYCVLTGTDFDYWGQGTLVTVSS

SEQ ID NO: 1271 - protein, 116 aa, Artificial Sequence
  Description of Artificial Sequence: Synthetic polypeptide
  Synthetic Construct
EVQLLESGGGLVQPGGSLRLSCAASGYTVSRYWMHWVRQAPGKGLEWIGRIDPNSGGTKYNDSVKGRFTISRDNSKNTLYLQMNSLRAEDTAVYYCVLTGTDFDYWGQGTLVTVSS

SEQ ID NO: 1272 - protein, 116 aa, Artificial Sequence
  Description of Artificial Sequence: Synthetic polypeptide
  Synthetic Construct
QVQLVQSGAEVKKPGSSVKVSCKASGYTVSRYWMHWVRQAPGQGLEWIGRIDPNSGGTKYNQKFQGRVTITADESTSTAYMELSSLRSEDTAVYYCVLTGTDFDYWGQGTLVTVSS

SEQ ID NO: 1273 - protein, 116 aa, Artificial Sequence
  Description of Artificial Sequence: Synthetic polypeptide
  Synthetic Construct
EVQLVQSGAEVKKPGESLKISCKGSGYTVSRYWMHWVRQMPGKGLEWIGRIDPNSGGTKYNPSFQGQVTISADKSISTAYLQWSSLKASDTAMYYCVLTGTDFDYWGQGTLVTVSS

SEQ ID NO: 1274 - protein, 116 aa, Artificial Sequence
  Description of Artificial Sequence: Synthetic polypeptide
  Synthetic Construct
EVQLVESGGGLVQPGGSLRLSCAASGYTVSRYWMHWVRQAPGKGLEWIGRIDPNSGGTKYNDSVKGRFTISRDNAKNSLYLQMNSLRAEDTAVYYCVLTGTDFDYWGQGTLVTVSS

SEQ ID NO: 1275 - protein, 116 aa, Artificial Sequence
  Description of Artificial Sequence: Synthetic polypeptide
  Synthetic Construct
QVQLVESGGGVVQPGRSLRLSCAASGYTVSRYWMHWVRQAPGKGLEWIGRIDPNSGGTKYNDSVKGRFTISRDNSKNTLYLQMNSLRAEDTAVYYCVLTGTDFDYWGQGTLVTVSS

SEQ ID NO: 1276 - protein, 116 aa, Artificial Sequence
  Description of Artificial Sequence: Synthetic polypeptide
  Synthetic Construct
QVQLQESGPGLVKPSETLSLTCTVSGYTVSRYWMHWIRQPPGKGLEWIGRIDPNSGGTKYNPSLKSRVTISVDTSKNQFSLKLSSVTAADTAVYYCVLTGTDFDYWGQGTLVTVSS

SEQ ID NO: 1277 - protein, 116 aa, Artificial Sequence
  Description of Artificial Sequence: Synthetic polypeptide
  Synthetic Construct
EVQLVESGGGLVKPGGSLRLSCAASGYTVSRYWMHWVRQAPGKGLEWIGRIDPNSGGTKYNAPVKGRFTISRDDSKNTLYLQMNSLKTEDTAVYYCVLTGTDFDYWGQGTLVTVSS

SEQ ID NO: 1278 - protein, 116 aa, Artificial Sequence
  Description of Artificial Sequence: Synthetic polypeptide
  Synthetic Construct
QVQLQESGPGLVKPSQTLSLTCTVSGYTVSRYWMHWIRQPPGKGLEWIGRIDPNSGGTKYNPSLKSRVTISVDTSKNQFSLKLSSVTAADTAVYYCVLTGTDFDYWGQGTLVTVSS

SEQ ID NO: 1279 - protein, 122 aa, Artificial Sequence
  Description of Artificial Sequence: Synthetic polypeptide
  Synthetic Construct
  MOD_RES (1)..(1): Glutamic acid or Glutamine
XVQLVESGGGLVQPKGSLKLSCAASGFSFNTYAMNWVRQAPGKGLEWIARIRSKSNNYATYYADSVKDRFTCSRDDSENMFYLQLSSLKTEDTAIYYCVRHGDGNLWYIDVWGTGTTVTVSS

SEQ ID NO: 1280 - protein, 122 aa, Artificial Sequence
  Description of Artificial Sequence: Synthetic polypeptide
  Synthetic Construct
EVQLVESGGGLVQPKGSLKLSCAASGFSFNTYAMNWVRQAPGKGLEWIARIRSKSNNYATYYADSVKDRFTCSRDDSENMFYLQLSSLKTEDTAMYYCVRHGDGNLWYIDVWGTGTTVTVSS

SEQ ID NO: 1281 - protein, 120 aa, Artificial Sequence
  Description of Artificial Sequence: Synthetic polypeptide
  Synthetic Construct
QVQLQQSGAELVKPGASVKMSCKTSGYPFSNFWITWVKQRPGQGLVWIGDIYPGSDNSNYNEKFKTKATLTVDTSSSTAYMHLSSLTSEDSAVYFCAREAYYTNPGFAYWGQGTLVTVST

SEQ ID NO: 1282 - protein, 120 aa, Artificial Sequence
  Description of Artificial Sequence: Synthetic polypeptide
  Synthetic Construct
EVQLVQSGAEVKKPGESLKISCKGSGYPFSNFWITWVRQMPGKGLEWIGDIYPGSDNSNYNPSFQGQVTISADKSISTAYLQWSSLKASDTAMYYCAREAYYTNPGFAYWGQGTLVTVSS

SEQ ID NO: 1283 - protein, 120 aa, Artificial Sequence
  Description of Artificial Sequence: Synthetic polypeptide
  Synthetic Construct
QVQLVQSGAEVKKPGSSVKVSCKASGYPFSNFWITWVRQAPGQGLEWIGDIYPGSDNSNYNQKFQGRVTITADESTSTAYMELSSLRSEDTAVYYCAREAYYTNPGFAYWGQGTLVTVSS

SEQ ID NO: 1284 - protein, 120 aa, Artificial Sequence
  Description of Artificial Sequence: Synthetic polypeptide
  Synthetic Construct
QVQLVQSGAEVKKPGASVKVSCKASGYPFSNFWITWVRQAPGQGLEWIGDIYPGSDNSNYNQKFQGRVTMTRDTSTSTVYMELSSLRSEDTAVYYCAREAYYTNPGFAYWGQGTLVTVSS

SEQ ID NO: 1285 - protein, 120 aa, Artificial Sequence
  Description of Artificial Sequence: Synthetic polypeptide
  Synthetic Construct
EVQLVESGGGLVQPGGSLRLSCAASGYPFSNFWITWVRQAPGKGLEWIGDIYPGSDNSNYNDSVKGRFTISRDNAKNSLYLQMNSLRAEDTAVYYCAREAYYTNPGFAYWGQGTLVTVSS

SEQ ID NO: 1286 - protein, 120 aa, Artificial Sequence
  Description of Artificial Sequence: Synthetic polypeptide
  Synthetic Construct
QVQLVESGGGVVQPGRSLRLSCAASGYPFSNFWITWVRQAPGKGLEWIGDIYPGSDNSNYNDSVKGRFTISRDNSKNTLYLQMNSLRAEDTAVYYCAREAYYTNPGFAYWGQGTLVTVSS

SEQ ID NO: 1287 - protein, 120 aa, Artificial Sequence
  Description of Artificial Sequence: Synthetic polypeptide
  Synthetic Construct
EVQLLESGGGLVQPGGSLRLSCAASGYPFSNFWITWVRQAPGKGLEWIGDIYPGSDNSNYNDSVKGRFTISRDNSKNTLYLQMNSLRAEDTAVYYCAREAYYTNPGFAYWGQGTLVTVSS

SEQ ID NO: 1288 - protein, 120 aa, Artificial Sequence
  Description of Artificial Sequence: Synthetic polypeptide
  Synthetic Construct
QVQLQESGPGLVKPSETLSLTCTVSGYPFSNFWITWIRQPPGKGLEWIGDIYPGSDNSNYNPSLKSRVTISVDTSKNQFSLKLSSVTAADTAVYYCAREAYYTNPGFAYWGQGTLVTVSS

SEQ ID NO: 1289 - protein, 120 aa, Artificial Sequence
  Description of Artificial Sequence: Synthetic polypeptide
  Synthetic Construct
EVQLVESGGGLVKPGGSLRLSCAASGYPFSNFWITWVRQAPGKGLEWIGDIYPGSDNSNYNAPVKGRFTISRDDSKNTLYLQMNSLKTEDTAVYYCAREAYYTNPGFAYWGQGTLVTVSS

SEQ ID NO: 1290 - protein, 120 aa, Artificial Sequence
  Description of Artificial Sequence: Synthetic polypeptide
  Synthetic Construct
QLQLQESGPGLVKPSETLSLTCTVSGYPFSNFWITWIRQPPGKGLEWIGDIYPGSDNSNYNPSLKSRVTISVDTSKNQFSLKLSSVTAADTAVYYCAREAYYTNPGFAYWGQGTLVTVSS

SEQ ID NO: 1291 - protein, 120 aa, Artificial Sequence
  Description of Artificial Sequence: Synthetic polypeptide
  Synthetic Construct
  MOD_RES (6)..(7): Glutamic acid or Glutamine
  MOD_RES (11)..(11): Any naturally occurring amino acid
  MOD_RES (18)..(18): Any Amino Acid
  MOD_RES (19)..(20): Any naturally occurring amino acid
  MOD_RES (24)..(24): Any naturally occurring amino acid
  MOD_RES (72)..(72): Any naturally occurring amino acid
  MOD_RES (83)..(83): Any naturally occurring amino acid
  MOD_RES (87)..(88): Any naturally occurring amino acid
  MOD_RES (90)..(90): Any naturally occurring amino acid
  MOD_RES (98)..(98): Any naturally occurring amino acid
EVQLVXXGRGXSQGKGSXXXGRAXRCLTSNTYTQTGVPQGPGKGREWESVIRSKSNNFSTLYADSVKDRFTXSRDDSESLFYXQMSXXKXEDTAMYYXVRHKSNRYPGVYWGQGTIVTVS

SEQ ID NO: 1292 - protein, 121 aa, Artificial Sequence
  Description of Artificial Sequence: Synthetic polypeptide
  Synthetic Construct
EVQLVESGGGLVKPGGSLRLSCAASGLTSNTYTQTWVRQAPGKGLEWESVIRSKSNNFSTLYAAPVKGRFTISRDDSKNTLYLQMNSLKTEDTAVYYCVRHKSNRYPGVYWGQGTLVTVSS

SEQ ID NO: 1293 - protein, 121 aa, Artificial Sequence
  Description of Artificial Sequence: Synthetic polypeptide
  Synthetic Construct
QVQLVESGGGVVQPGRSLRLSCAASGLTSNTYTQTWVRQAPGKGLEWESVIRSKSNNFSTLYADSVKGRFTISRDNSKNTLYLQMNSLRAEDTAVYYCVRHKSNRYPGVYWGQGTLVTVSS

SEQ ID NO: 1294 - protein, 121 aa, Artificial Sequence
  Description of Artificial Sequence: Synthetic polypeptide
  Synthetic Construct
EVQLLESGGGLVQPGGSLRLSCAASGLTSNTYTQTWVRQAPGKGLEWESVIRSKSNNFSTLYADSVKGRFTISRDNSKNTLYLQMNSLRAEDTAVYYCVRHKSNRYPGVYWGQGTLVTVSS

SEQ ID NO: 1295 - protein, 121 aa, Artificial Sequence
  Description of Artificial Sequence: Synthetic polypeptide
  Synthetic Construct
QVQLVQSGAEVKKPGASVKVSCKASGLTSNTYTQTWVRQAPGQGLEWESVIRSKSNNFSTLYAQKFQGRVTMTRDTSTSTVYMELSSLRSEDTAVYYCVRHKSNRYPGVYWGQGTLVTVSS

SEQ ID NO: 1296 - protein, 121 aa, Artificial Sequence
  Description of Artificial Sequence: Synthetic polypeptide
  Synthetic Construct
EVQLVESGGGLVQPGGSLRLSCAASGLTSNTYTQTWVRQAPGKGLEWESVIRSKSNNFSTLYADSVKGRFTISRDNAKNSLYLQMNSLRAEDTAVYYCVRHKSNRYPGVYWGQGTLVTVSS

SEQ ID NO: 1297 - protein, 121 aa, Artificial Sequence
  Description of Artificial Sequence: Synthetic polypeptide
  Synthetic Construct
QVQLVQSGAEVKKPGSSVKVSCKASGLTSNTYTQTWVRQAPGQGLEWESVIRSKSNNFSTLYAQKFQGRVTITADESTSTAYMELSSLRSEDTAVYYCVRHKSNRYPGVYWGQGTLVTVSS

SEQ ID NO: 1298 - protein, 121 aa, Artificial Sequence
  Description of Artificial Sequence: Synthetic polypeptide
  Synthetic Construct
EVQLVQSGAEVKKPGESLKISCKGSGLTSNTYTQTWVRQMPGKGLEWESVIRSKSNNFSTLYAPSFQGQVTISADKSISTAYLQWSSLKASDTAMYYCVRHKSNRYPGVYWGQGTLVTVSS

SEQ ID NO: 1299 - protein, 121 aa, Artificial Sequence
  Description of Artificial Sequence: Synthetic polypeptide
  Synthetic Construct
QVQLQESGPGLVKPSETLSLTCTVSGLTSNTYTQTWIRQPPGKGLEWESVIRSKSNNFSTLYAPSLKSRVTISVDTSKNQFSLKLSSVTAADTAVYYCVRHKSNRYPGVYWGQGTLVTVSS

SEQ ID NO: 1300 - protein, 121 aa, Artificial Sequence
  Description of Artificial Sequence: Synthetic polypeptide
  Synthetic Construct
QLQLQESGPGLVKPSETLSLTCTVSGLTSNTYTQTWIRQPPGKGLEWESVIRSKSNNFSTLYAPSLKSRVTISVDTSKNQFSLKLSSVTAADTAVYYCVRHKSNRYPGVYWGQGTLVTVSS

SEQ ID NO: 1301 - protein, 122 aa, Artificial Sequence
  Description of Artificial Sequence: Synthetic polypeptide
  Synthetic Construct
EVKLEESGGGLVQPGGSMKLSCTASGFTFSDAWMDWVRQSPEKGLEWVAEIRNKVNNHATYYAESVKGRFTISRDDSKSTVYLQMNSLRTEDTGIYYCTSLYDGYYLRFAYWGQGTLVTVSA

SEQ ID NO: 1302 - protein, 122 aa, Artificial Sequence
  Description of Artificial Sequence: Synthetic polypeptide
  Synthetic Construct
EVQLVESGGGLVKPGGSLRLSCAASGFTFSDAWMDWVRQAPGKGLEWWVAEIRNKVNNHATYYAPVKGRFTISRDDSKNTLYLQMNSLKTEDTAVYYCCTSLYDGYYLRFAWGQGTLVTVSS

SEQ ID NO: 1303 - protein, 122 aa, Artificial Sequence
  Description of Artificial Sequence: Synthetic polypeptide
  Synthetic Construct
EVQLVESGGGLVQPGGSLRLSCAASGFTFSDAWMDWVRQAPGKGLEWWVAEIRNKVNNHATYYDSVKGRFTISRDNAKNSLYLQMNSLRAEDTAVYYCCTSLYDGYYLRFAWGQGTLVTVSS

SEQ ID NO: 1304 - protein, 122 aa, Artificial Sequence
  Description of Artificial Sequence: Synthetic polypeptide
  Synthetic Construct
EVQLLESGGGLVQPGGSLRLSCAASGFTFSDAWMDWVRQAPGKGLEWWVAEIRNKVNNHATYYDSVKGRFTISRDNSKNTLYLQMNSLRAEDTAVYYCCTSLYDGYYLRFAWGQGTLVTVSS

SEQ ID NO: 1305 - protein, 122 aa, Artificial Sequence
  Description of Artificial Sequence: Synthetic polypeptide
  Synthetic Construct
QVQLVESGGGVVQPGRSLRLSCAASGFTFSDAWMDWVRQAPGKGLEWWVAEIRNKVNNHATYYDSVKGRFTISRDNSKNTLYLQMNSLRAEDTAVYYCCTSLYDGYYLRFAWGQGTLVTVSS

SEQ ID NO: 1306 - protein, 122 aa, Artificial Sequence
  Description of Artificial Sequence: Synthetic polypeptide
  Synthetic Construct
QVQLVQSGAEVKKPGASVKVSCKASGFTFSDAWMDWVRQAPGQGLEWWVAEIRNKVNNHATYYQKFQGRVTMTRDTSTSTVYMELSSLRSEDTAVYYCCTSLYDGYYLRFAWGQGTLVTVSS

SEQ ID NO: 1307 - protein, 122 aa, Artificial Sequence
  Description of Artificial Sequence: Synthetic polypeptide
  Synthetic Construct
QVQLVQSGAEVKKPGSSVKVSCKASGFTFSDAWMDWVRQAPGQGLEWWVAEIRNKVNNHATYYQKFQGRVTITADESTSTAYMELSSLRSEDTAVYYCCTSLYDGYYLRFAWGQGTLVTVSS

SEQ ID NO: 1308 - protein, 122 aa, Artificial Sequence
  Description of Artificial Sequence: Synthetic polypeptide
  Synthetic Construct
EVQLVQSGAEVKKPGESLKISCKGSGFTFSDAWMDWVRQMPGKGLEWWVAEIRNKVNNHATYYPSFQGQVTISADKSISTAYLQWSSLKASDTAMYYCCTSLYDGYYLRFAWGQGTLVTVSS

SEQ ID NO: 1309 - protein, 122 aa, Artificial Sequence
  Description of Artificial Sequence: Synthetic polypeptide
  Synthetic Construct
QVQLQESGPGLVKPSETLSLTCTVSGFTFSDAWMDWIRQPPGKGLEWWVAEIRNKVNNHATYYPSLKSRVTISVDTSKNQFSLKLSSVTAADTAVYYCCTSLYDGYYLRFAWGQGTLVTVSS

SEQ ID NO: 1310 - protein, 122 aa, Artificial Sequence
  Description of Artificial Sequence: Synthetic polypeptide
  Synthetic Construct
QLQLQESGPGLVKPSETLSLTCTVSGFTFSDAWMDWIRQPPGKGLEWWVAEIRNKVNNHATYYPSLKSRVTISVDTSKNQFSLKLSSVTAADTAVYYCCTSLYDGYYLRFAWGQGTLVTVSS

SEQ ID NO: 1311 - protein, 102 aa, Artificial Sequence
  Description of Artificial Sequence: Synthetic polypeptide
  Synthetic Construct
  MOD_RES (36)..(36): Glutamic acid or Glutamine
  MOD_RES (67)..(67): Glutamic acid or Glutamine
  MOD_RES (81)..(81): Any naturally occurring amino acid
  MOD_RES (83)..(83): Any naturally occurring amino acid
LSCAASGFTFNTYSMNWVRQAPGKGLEWVAHIKTKXNNFATFYADSVKDRFTISRDDSESMLYLQMXNLKTEDTAMYYCVXHXSNNYPFAYWGQGTLVTVSA

SEQ ID NO: 1312 - protein, 121 aa, Artificial Sequence
  Description of Artificial Sequence: Synthetic polypeptide
  Synthetic Construct
  MOD_RES (55)..(55): Glutamic acid or Glutamine
  MOD_RES (100)..(100): Glutamic acid or Glutamine
  MOD_RES (102)..(102): Any naturally occurring amino acid
EVQLVESGGGLVKPGGSLRLSCAASGFTFNTYSMNWVRQAPGKGLEWVAHIKTKXNNFATFYAAPVKGRFTISRDDSKNTLYLQMNSLKTEDTAVYYCVXHXSNNYPFAYWGQGTLVTVSS

SEQ ID NO: 1313 - protein, 121 aa, Artificial Sequence
  Description of Artificial Sequence: Synthetic polypeptide
  Synthetic Construct
  MOD_RES (55)..(55): Glutamic acid or Glutamine
  MOD_RES (100)..(100): Glutamic acid or Glutamine
  MOD_RES (102)..(102): Any naturally occurring amino acid
EVQLVESGGGLVQPGGSLRLSCAASGFTFNTYSMNWVRQAPGKGLEWVAHIKTKXNNFATFYADSVKGRFTISRDNAKNSLYLQMNSLRAEDTAVYYCVXHXSNNYPFAYWGQGTLVTVSS

SEQ ID NO: 1314 - protein, 121 aa, Artificial Sequence
  Description of Artificial Sequence: Synthetic polypeptide
  Synthetic Construct
  MOD_RES (55)..(55): Glutamic acid or Glutamine
  MOD_RES (100)..(100): Glutamic acid or Glutamine
  MOD_RES (102)..(102): Any naturally occurring amino acid
EVQLLESGGGLVQPGGSLRLSCAASGFTFNTYSMNWVRQAPGKGLEWVAHIKTKXNNFATFYADSVKGRFTISRDNSKNTLYLQMNSLRAEDTAVYYCVXHXSNNYPFAYWGQGTLVTVSS

SEQ ID NO: 1315 - protein, 121 aa, Artificial Sequence
  Description of Artificial Sequence: Synthetic polypeptide
  Synthetic Construct
  MOD_RES (55)..(55): Glutamic acid or Glutamine
  MOD_RES (100)..(100): Glutamic acid or Glutamine
  MOD_RES (102)..(102): Any naturally occurring amino acid
QVQLVESGGGVVQPGRSLRLSCAASGFTFNTYSMNWVRQAPGKGLEWVAHIKTKXNNFATFYADSVKGRFTISRDNSKNTLYLQMNSLRAEDTAVYYCVXHXSNNYPFAYWGQGTLVTVSS

SEQ ID NO: 1316 - protein, 121 aa, Artificial Sequence
  Description of Artificial Sequence: Synthetic polypeptide
  Synthetic Construct
  MOD_RES (55)..(55): Glutamic acid or Glutamine
  MOD_RES (100)..(100): Glutamic acid or Glutamine
  MOD_RES (102)..(102): Any naturally occurring amino acid
QVQLVQSGAEVKKPGASVKVSCKASGFTFNTYSMNWVRQAPGQGLEWVAHIKTKXNNFATFYAQKFQGRVTMTRDTSTSTVYMELSSLRSEDTAVYYCVXHXSNNYPFAYWGQGTLVTVSS

SEQ ID NO: 1317 - protein, 121 aa, Artificial Sequence
  Description of Artificial Sequence: Synthetic polypeptide
  Synthetic Construct
  MOD_RES (55)..(55): Glutamic acid or Glutamine
  MOD_RES (100)..(100): Glutamic acid or Glutamine
  MOD_RES (102)..(102): Any naturally occurring amino acid
QVQLVQSGAEVKKPGSSVKVSCKASGFTFNTYSMNWVRQAPGQGLEWVAHIKTKXNNFATFYAQKFQGRVTITADESTSTAYMELSSLRSEDTAVYYCVXHXSNNYPFAYWGQGTLVTVSS

SEQ ID NO: 1318 - protein, 121 aa, Artificial Sequence
  Description of Artificial Sequence: Synthetic polypeptide
  Synthetic Construct
  MOD_RES (55)..(55): Glutamic acid or Glutamine
  MOD_RES (100)..(100): Glutamic acid or Glutamine
  MOD_RES (102)..(102): Any naturally occurring amino acid
EVQLVQSGAEVKKPGESLKISCKGSGFTFNTYSMNWVRQMPGKGLEWVAHIKTKXNNFATFYAPSFQGQVTISADKSISTAYLQWSSLKASDTAMYYCVXHXSNNYPFAYWGQGTLVTVSS

SEQ ID NO: 1319 - protein, 121 aa, Artificial Sequence
  Description of Artificial Sequence: Synthetic polypeptide
  Synthetic Construct
  MOD_RES (55)..(55): Glutamic acid or Glutamine
  MOD_RES (100)..(100): Glutamic acid or Glutamine
  MOD_RES (102)..(102): Any naturally occurring amino acid
QVQLQESGPGLVKPSETLSLTCTVSGFTFNTYSMNWIRQPPGKGLEWVAHIKTKXNNFATFYAPSLKSRVTISVDTSKNQFSLKLSSVTAADTAVYYCVXHXSNNYPFAYWGQGTLVTVSS

SEQ ID NO: 1320 - protein, 121 aa, Artificial Sequence
  Description of Artificial Sequence: Synthetic polypeptide
  Synthetic Construct
  MOD_RES (55)..(55): Glutamic acid or Glutamine
  MOD_RES (100)..(100): Glutamic acid or Glutamine
  MOD_RES (102)..(102): Any naturally occurring amino acid
QVQLQESGPGLVKPSQTLSLTCTVSGFTFNTYSMNWIRQPPGKGLEWVAHIKTKXNNFATFYAPSLKSRVTISVDTSKNQFSLKLSSVTAADTAVYYCVXHXSNNYPFAYWGQGTLVTVSS

SEQ ID NO: 1321 - protein, 116 aa, Artificial Sequence
  Description of Artificial Sequence: Synthetic polypeptide
  Synthetic Construct
  MOD_RES (91)..(91): Glutamic acid or Glutamine
QVQLQQSGAVLVKPGASVKLSCKASGYTFTTYWIHWVKQRPGRGPEWIGRNDPNSGGSNYNEKFRNKAILTVDKPSSTAYMQLNSLTSEDXAVYYCVRTNWDGDFWGQGTTLTVSS

SEQ ID NO: 1322 - protein, 116 aa, Artificial Sequence
  Description of Artificial Sequence: Synthetic polypeptide
  Synthetic Construct
QVQLVQSGAEVKKPGASVKVSCKASGYTFTTYWIHWVRQAPGQGLEWIGRNDPNSGGSNYNQKFQGRVTMTRDTSTSTVYMELSSLRSEDTAVYYCVRTNWDGDFWGQGTLVTVSS

SEQ ID NO: 1323 - protein, 116 aa, Artificial Sequence
  Description of Artificial Sequence: Synthetic polypeptide
  Synthetic Construct
EVQLVQSGAEVKKPGESLKISCKGSGYTFTTYWIHWVRQMPGKGLEWIGRNDPNSGGSNYNPSFQGQVTISADKSISTAYLQWSSLKASDTAMYYCVRTNWDGDFWGQGTLVTVSS

SEQ ID NO: 1324 - protein, 116 aa, Artificial Sequence
  Description of Artificial Sequence: Synthetic polypeptide
  Synthetic Construct
QVQLVQSGAEVKKPGSSVKVSCKASGYTFTTYWIHWVRQAPGQGLEWIGRNDPNSGGSNYNQKFQGRVTITADESTSTAYMELSSLRSEDTAVYYCVRTNWDGDFWGQGTLVTVSS

SEQ ID NO: 1325 - protein, 116 aa, Artificial Sequence
  Description of Artificial Sequence: Synthetic polypeptide
  Synthetic Construct
EVQLLESGGGLVQPGGSLRLSCAASGYTFTTYWIHWVRQAPGKGLEWIGRNDPNSGGSNYNDSVKGRFTISRDNSKNTLYLQMNSLRAEDTAVYYCVRTNWDGDFWGQGTLVTVSS

SEQ ID NO: 1326 - protein, 116 aa, Artificial Sequence
  Description of Artificial Sequence: Synthetic polypeptide
  Synthetic Construct
EVQLVESGGGLVQPGGSLRLSCAASGYTFTTYWIHWVRQAPGKGLEWIGRNDPNSGGSNYNDSVKGRFTISRDNAKNSLYLQMNSLRAEDTAVYYCVRTNWDGDFWGQGTLVTVSS

SEQ ID NO: 1327 - protein, 116 aa, Artificial Sequence
  Description of Artificial Sequence: Synthetic polypeptide
  Synthetic Construct
QVQLVESGGGVVQPGRSLRLSCAASGYTFTTYWIHWVRQAPGKGLEWIGRNDPNSGGSNYNDSVKGRFTISRDNSKNTLYLQMNSLRAEDTAVYYCVRTNWDGDFWGQGTLVTVSS

SEQ ID NO: 1328 - protein, 116 aa, Artificial Sequence
  Description of Artificial Sequence: Synthetic polypeptide
  Synthetic Construct
QVQLQESGPGLVKPSETLSLTCTVSGYTFTTYWIHWIRQPPGKGLEWIGRNDPNSGGSNYNPSLKSRVTISVDTSKNQFSLKLSSVTAADTAVYYCVRTNWDGDFWGQGTLVTVSS

SEQ ID NO: 1329 - protein, 116 aa, Artificial Sequence
  Description of Artificial Sequence: Synthetic polypeptide
  Synthetic Construct
EVQLVESGGGLVKPGGSLRLSCAASGYTFTTYWIHWVRQAPGKGLEWIGRNDPNSGGSNYNAPVKGRFTISRDDSKNTLYLQMNSLKTEDTAVYYCVRTNWDGDFWGQGTLVTVSS

SEQ ID NO: 1330 - protein, 116 aa, Artificial Sequence
  Description of Artificial Sequence: Synthetic polypeptide
  Synthetic Construct
QVQLQESGPGLVKPSQTLSLTCTVSGYTFTTYWIHWIRQPPGKGLEWIGRNDPNSGGSNYNPSLKSRVTISVDTSKNQFSLKLSSVTAADTAVYYCVRTNWDGDFWGQGTLVTVSS

SEQ ID NO: 1331 - protein, 126 aa, Artificial Sequence
  Description of Artificial Sequence: Synthetic polypeptide
  Synthetic Construct
EVQLQQSGAELVKPGASVKISCKASGYAFSNYWMSWVKQRPGKGLEWIGQIYPGDGDTKYNGKFEGKATLTADKSSSTAYMQLSSLTSEDSAVYFCSREKGADYYGSTYSAWFSYWGQGTLVTVSA

SEQ ID NO: 1332 - protein, 126 aa, Artificial Sequence
  Description of Artificial Sequence: Synthetic polypeptide
  Synthetic Construct
EVQLVQSGAEVKKPGESLKISCKGSGYAFSNYWMSWVRQMPGKGLEWIGQIYPGDGDTKYNPSFQGQVTISADKSISTAYLQWSSLKASDTAMYYCSREKGADYYGSTYSAWFSYWGQGTLVTVSS

SEQ ID NO: 1333 - protein, 126 aa, Artificial Sequence
  Description of Artificial Sequence: Synthetic polypeptide
  Synthetic Construct
QVQLVQSGAEVKKPGASVKVSCKASGYAFSNYWMSWVRQAPGQGLEWIGQIYPGDGDTKYNQKFQGRVTMTRDTSTSTVYMELSSLRSEDTAVYYCSREKGADYYGSTYSAWFSYWGQGTLVTVSS

SEQ ID NO: 1334 - protein, 126 aa, Artificial Sequence
  Description of Artificial Sequence: Synthetic polypeptide
  Synthetic Construct
EVQLLESGGGLVQPGGSLRLSCAASGYAFSNYWMSWVRQAPGKGLEWIGQIYPGDGDTKYNDSVKGRFTISRDNSKNTLYLQMNSLRAEDTAVYYCSREKGADYYGSTYSAWFSYWGQGTLVTVSS

SEQ ID NO: 1335 - protein, 126 aa, Artificial Sequence
  Description of Artificial Sequence: Synthetic polypeptide
  Synthetic Construct
QVQLVQSGAEVKKPGSSVKVSCKASGYAFSNYWMSWVRQAPGQGLEWIGQIYPGDGDTKYNQKFQGRVTITADESTSTAYMELSSLRSEDTAVYYCSREKGADYYGSTYSAWFSYWGQGTLVTVSS

SEQ ID NO: 1336 - protein, 126 aa, Artificial Sequence
  Description of Artificial Sequence: Synthetic polypeptide
  Synthetic Construct
EVQLVESGGGLVQPGGSLRLSCAASGYAFSNYWMSWVRQAPGKGLEWIGQIYPGDGDTKYNDSVKGRFTISRDNAKNSLYLQMNSLRAEDTAVYYCSREKGADYYGSTYSAWFSYWGQGTLVTVSS

SEQ ID NO: 1337 - protein, 126 aa, Artificial Sequence
  Description of Artificial Sequence: Synthetic polypeptide
  Synthetic Construct
QVQLVESGGGVVQPGRSLRLSCAASGYAFSNYWMSWVRQAPGKGLEWIGQIYPGDGDTKYNDSVKGRFTISRDNSKNTLYLQMNSLRAEDTAVYYCSREKGADYYGSTYSAWFSYWGQGTLVTVSS

SEQ ID NO: 1338 - protein, 126 aa, Artificial Sequence
  Description of Artificial Sequence: Synthetic polypeptide
  Synthetic Construct
QVQLQESGPGLVKPSETLSLTCTVSGYAFSNYWMSWIRQPPGKGLEWIGQIYPGDGDTKYNPSLKSRVTISVDTSKNQFSLKLSSVTAADTAVYYCSREKGADYYGSTYSAWFSYWGQGTLVTVSS

SEQ ID NO: 1339 - protein, 126 aa, Artificial Sequence
  Description of Artificial Sequence: Synthetic polypeptide
  Synthetic Construct
EVQLVESGGGLVKPGGSLRLSCAASGYAFSNYWMSWVRQAPGKGLEWIGQIYPGDGDTKYNAPVKGRFTISRDDSKNTLYLQMNSLKTEDTAVYYCSREKGADYYGSTYSAWFSYWGQGTLVTVSS

SEQ ID NO: 1340 - protein, 126 aa, Artificial Sequence
  Description of Artificial Sequence: Synthetic polypeptide
  Synthetic Construct
QVQLQESGPGLVKPSQTLSLTCTVSGYAFSNYWMSWIRQPPGKGLEWIGQIYPGDGDTKYNPSLKSRVTISVDTSKNQFSLKLSSVTAADTAVYYCSREKGADYYGSTYSAWFSYWGQGTLVTVSS

SEQ ID NO: 1341 - protein, 123 aa, Artificial Sequence
  Description of Artificial Sequence: Synthetic polypeptide
  Synthetic Construct
QVQLQQSGPELVKPGASLKISCKASGYAFSSSWMNWVKQRPGKGLEWIGRIYPGDGDTNYNGEFRVRATLTADTSSTTAYMQLSSLTSEDSAVYFCARLLRNQPGESYAMDYWGQGASVTVSS

SEQ ID NO: 1342 - protein, 123 aa, Artificial Sequence
  Description of Artificial Sequence: Synthetic polypeptide
  Synthetic Construct
EVQLVQSGAEVKKPGESLKISCKGSGYAFSSSWMNWVRQMPGKGLEWIGRIYPGDGDTNYNPSFQGQVTISADKSISTAYLQWSSLKASDTAMYYCARLLRNQPGESYAMDYWGQGTLVTVSS

SEQ ID NO: 1343 - protein, 123 aa, Artificial Sequence
  Description of Artificial Sequence: Synthetic polypeptide
  Synthetic Construct
QVQLVQSGAEVKKPGASVKVSCKASGYAFSSSWMNWVRQAPGQGLEWIGRIYPGDGDTNYNQKFQGRVTMTRDTSTSTVYMELSSLRSEDTAVYYCARLLRNQPGESYAMDYWGQGTLVTVSS

SEQ ID NO: 1344 - protein, 123 aa, Artificial Sequence
  Description of Artificial Sequence: Synthetic polypeptide
  Synthetic Construct
QVQLVQSGAEVKKPGSSVKVSCKASGYAFSSSWMNWVRQAPGQGLEWIGRIYPGDGDTNYNQKFQGRVTITADESTSTAYMELSSLRSEDTAVYYCARLLRNQPGESYAMDYWGQGTLVTVSS

SEQ ID NO: 1345 - protein, 123 aa, Artificial Sequence
  Description of Artificial Sequence: Synthetic polypeptide
  Synthetic Construct
EVQLLESGGGLVQPGGSLRLSCAASGYAFSSSWMNWVRQAPGKGLEWIGRIYPGDGDTNYNDSVKGRFTISRDNSKNTLYLQMNSLRAEDTAVYYCARLLRNQPGESYAMDYWGQGTLVTVSS

SEQ ID NO: 1346 - protein, 123 aa, Artificial Sequence
  Description of Artificial Sequence: Synthetic polypeptide
  Synthetic Construct
EVQLVESGGGLVQPGGSLRLSCAASGYAFSSSWMNWVRQAPGKGLEWIGRIYPGDGDTNYNDSVKGRFTISRDNAKNSLYLQMNSLRAEDTAVYYCARLLRNQPGESYAMDYWGQGTLVTVSS

SEQ ID NO: 1347 - protein, 123 aa, Artificial Sequence
  Description of Artificial Sequence: Synthetic polypeptide
  Synthetic Construct
QVQLVESGGGVVQPGRSLRLSCAASGYAFSSSWMNWVRQAPGKGLEWIGRIYPGDGDTNYNDSVKGRFTISRDNSKNTLYLQMNSLRAEDTAVYYCARLLRNQPGESYAMDYWGQGTLVTVSS

SEQ ID NO: 1348 - protein, 123 aa, Artificial Sequence
  Description of Artificial Sequence: Synthetic polypeptide
  Synthetic Construct
QVQLQESGPGLVKPSETLSLTCTVSGYAFSSSWMNWIRQPPGKGLEWIGRIYPGDGDTNYNPSLKSRVTISVDTSKNQFSLKLSSVTAADTAVYYCARLLRNQPGESYAMDYWGQGTLVTVSS

SEQ ID NO: 1349 - protein, 123 aa, Artificial Sequence
  Description of Artificial Sequence: Synthetic polypeptide
  Synthetic Construct
EVQLVESGGGLVKPGGSLRLSCAASGYAFSSSWMNWVRQAPGKGLEWIGRIYPGDGDTNYNAPVKGRFTISRDDSKNTLYLQMNSLKTEDTAVYYCARLLRNQPGESYAMDYWGQGTLVTVSS

SEQ ID NO: 1350 - protein, 123 aa, Artificial Sequence
  Description of Artificial Sequence: Synthetic polypeptide
  Synthetic Construct
QVQLQESGPGLVKPSQTLSLTCTVSGYAFSSSWMNWIRQPPGKGLEWIGRIYPGDGDTNYNPSLKSRVTISVDTSKNQFSLKLSSVTAADTAVYYCARLLRNQPGESYAMDYWGQGTLVTVSS

SEQ ID NO: 1351 - protein, 116 aa, Artificial Sequence
  Description of Artificial Sequence: Synthetic polypeptide
  Synthetic Construct
QVQLQQSGAELVKPGASVKLSCKASGYIFTTYWIHWVKQRPGRGPEWIGRIDPNNGDTNYNEKFKTKATLTVDKPSSTADMQLSSLTSEDSAVYYCVMTGTDFDYWGQGTTLTVSS

SEQ ID NO: 1352 - protein, 116 aa, Artificial Sequence
  Description of Artificial Sequence: Synthetic polypeptide
  Synthetic Construct
EVQLVQSGAEVKKPGESLKISCKGSGYIFTTYWIHWVRQMPGKGLEWIGRIDPNNGDTNYNPSFQGQVTISADKSISTAYLQWSSLKASDTAMYYCVMTGTDFDYWGQGTLVTVSS

SEQ ID NO: 1353 - protein, 116 aa, Artificial Sequence
  Description of Artificial Sequence: Synthetic polypeptide
  Synthetic Construct
QVQLVQSGAEVKKPGASVKVSCKASGYIFTTYWIHWVRQAPGQGLEWIGRIDPNNGDTNYNQKFQGRVTMTRDTSTSTVYMELSSLRSEDTAVYYCVMTGTDFDYWGQGTLVTVSS

SEQ ID NO: 1354 - protein, 116 aa, Artificial Sequence
  Description of Artificial Sequence: Synthetic polypeptide
  Synthetic Construct
QVQLVQSGAEVKKPGSSVKVSCKASGYIFTTYWIHWVRQAPGQGLEWIGRIDPNNGDTNYNQKFQGRVTITADESTSTAYMELSSLRSEDTAVYYCVMTGTDFDYWGQGTLVTVSS

SEQ ID NO: 1355 - protein, 116 aa, Artificial Sequence
  Description of Artificial Sequence: Synthetic polypeptide
  Synthetic Construct
EVQLLESGGGLVQPGGSLRLSCAASGYIFTTYWIHWVRQAPGKGLEWIGRIDPNNGDTNYNDSVKGRFTISRDNSKNTLYLQMNSLRAEDTAVYYCVMTGTDFDYWGQGTLVTVSS

SEQ ID NO: 1356 - protein, 116 aa, Artificial Sequence
  Description of Artificial Sequence: Synthetic polypeptide
  Synthetic Construct
QVQLVESGGGVVQPGRSLRLSCAASGYIFTTYWIHWVRQAPGKGLEWIGRIDPNNGDTNYNDSVKGRFTISRDNSKNTLYLQMNSLRAEDTAVYYCVMTGTDFDYWGQGTLVTVSS

SEQ ID NO: 1357 - protein, 116 aa, Artificial Sequence
  Description of Artificial Sequence: Synthetic polypeptide
  Synthetic Construct
EVQLVESGGGLVQPGGSLRLSCAASGYIFTTYWIHWVRQAPGKGLEWIGRIDPNNGDTNYNDSVKGRFTISRDNAKNSLYLQMNSLRAEDTAVYYCVMTGTDFDYWGQGTLVTVSS

SEQ ID NO: 1358 - protein, 116 aa, Artificial Sequence
  Description of Artificial Sequence: Synthetic polypeptide
  Synthetic Construct
QVQLQESGPGLVKPSETLSLTCTVSGYIFTTYWIHWIRQPPGKGLEWIGRIDPNNGDTNYNPSLKSRVTISVDTSKNQFSLKLSSVTAADTAVYYCVMTGTDFDYWGQGTLVTVSS

SEQ ID NO: 1359 - protein, 116 aa, Artificial Sequence
  Description of Artificial Sequence: Synthetic polypeptide
  Synthetic Construct
EVQLVESGGGLVKPGGSLRLSCAASGYIFTTYWIHWVRQAPGKGLEWIGRIDPNNGDTNYNAPVKGRFTISRDDSKNTLYLQMNSLKTEDTAVYYCVMTGTDFDYWGQGTLVTVSS

SEQ ID NO: 1360 - protein, 116 aa, Artificial Sequence
  Description of Artificial Sequence: Synthetic polypeptide
  Synthetic Construct
QVQLQESGPGLVKPSQTLSLTCTVSGYIFTTYWIHWIRQPPGKGLEWIGRIDPNNGDTNYNPSLKSRVTISVDTSKNQFSLKLSSVTAADTAVYYCVMTGTDFDYWGQGTLVTVSS

SEQ ID NO: 1361 - protein, 120 aa, Artificial Sequence
  Description of Artificial Sequence: Synthetic polypeptide
  Synthetic Construct
QVQLQQSGAEVVKPGASVKMSCKTSGYPFSNFWITWVKQRPGQGLVWIGDIYPGSDNRNFNERFKTKATLTVDTSSSTAYMHLSSLTSEDSAVYFCAREAYYTNPGFAYWGQGTLVTVSA

SEQ ID NO: 1362 - protein, 120 aa, Artificial Sequence
  Description of Artificial Sequence: Synthetic polypeptide
  Synthetic Construct
EVQLVQSGAEVKKPGESLKISCKGSGYPFSNFWITWVRQMPGKGLEWIGDIYPGSDNRNFNPSFQGQVTISADKSISTAYLQWSSLKASDTAMYYCAREAYYTNPGFAYWGQGTLVTVSS

SEQ ID NO: 1363 - protein, 120 aa, Artificial Sequence
  Description of Artificial Sequence: Synthetic polypeptide
  Synthetic Construct
QVQLVQSGAEVKKPGSSVKVSCKASGYPFSNFWITWVRQAPGQGLEWIGDIYPGSDNRNFNQKFQGRVTITADESTSTAYMELSSLRSEDTAVYYCAREAYYTNPGFAYWGQGTLVTVSS

SEQ ID NO: 1364 - protein, 120 aa, Artificial Sequence
  Description of Artificial Sequence: Synthetic polypeptide
  Synthetic Construct
QVQLVQSGAEVKKPGASVKVSCKASGYPFSNFWITWVRQAPGQGLEWIGDIYPGSDNRNFNQKFQGRVTMTRDTSTSTVYMELSSLRSEDTAVYYCAREAYYTNPGFAYWGQGTLVTVSS

SEQ ID NO: 1365 - protein, 120 aa, Artificial Sequence
  Description of Artificial Sequence: Synthetic polypeptide
  Synthetic Construct
EVQLVESGGGLVQPGGSLRLSCAASGYPFSNFWITWVRQAPGKGLEWIGDIYPGSDNRNFNDSVKGRFTISRDNAKNSLYLQMNSLRAEDTAVYYCAREAYYTNPGFAYWGQGTLVTVSS

SEQ ID NO: 1366 - protein, 120 aa, Artificial Sequence
  Description of Artificial Sequence: Synthetic polypeptide
  Synthetic Construct
QVQLVESGGGVVQPGRSLRLSCAASGYPFSNFWITWVRQAPGKGLEWIGDIYPGSDNRNFNDSVKGRFTISRDNSKNTLYLQMNSLRAEDTAVYYCAREAYYTNPGFAYWGQGTLVTVSS

SEQ ID NO: 1367 - protein, 120 aa, Artificial Sequence
  Description of Artificial Sequence: Synthetic polypeptide
  Synthetic Construct
EVQLLESGGGLVQPGGSLRLSCAASGYPFSNFWITWVRQAPGKGLEWIGDIYPGSDNRNFNDSVKGRFTISRDNSKNTLYLQMNSLRAEDTAVYYCAREAYYTNPGFAYWGQGTLVTVSS

SEQ ID NO: 1368 - protein, 120 aa, Artificial Sequence
  Description of Artificial Sequence: Synthetic polypeptide
  Synthetic Construct
QVQLQESGPGLVKPSETLSLTCTVSGYPFSNFWITWIRQPPGKGLEWIGDIYPGSDNRNFNPSLKSRVTISVDTSKNQFSLKLSSVTAADTAVYYCAREAYYTNPGFAYWGQGTLVTVSS

SEQ ID NO: 1369 - protein, 120 aa, Artificial Sequence
  Description of Artificial Sequence: Synthetic polypeptide
  Synthetic Construct
EVQLVESGGGLVKPGGSLRLSCAASGYPFSNFWITWVRQAPGKGLEWIGDIYPGSDNRNFNAPVKGRFTISRDDSKNTLYLQMNSLKTEDTAVYYCAREAYYTNPGFAYWGQGTLVTVSS

SEQ ID NO: 1370 - protein, 120 aa, Artificial Sequence
  Description of Artificial Sequence: Synthetic polypeptide
  Synthetic Construct
QLQLQESGPGLVKPSETLSLTCTVSGYPFSNFWITWIRQPPGKGLEWIGDIYPGSDNRNFNPSLKSRVTISVDTSKNQFSLKLSSVTAADTAVYYCAREAYYTNPGFAYWGQGTLVTVSS

SEQ ID NO: 1371 - protein, 122 aa, Artificial Sequence
  Description of Artificial Sequence: Synthetic polypeptide
  Synthetic Construct
EVQLVESGGRLVQPKGSLKLSCAASGFNFNTYAMNWVRQAPGKGLEWVARIRSKSNNYATYYADSVKDRFTISRDDSESMLYLQMNNLKTEDTAMYYCVRHYSNYGWGFAYWGQGTLVTVSA

SEQ ID NO: 1372 - protein, 122 aa, Artificial Sequence
  Description of Artificial Sequence: Synthetic polypeptide
  Synthetic Construct
EVQLVESGGGLVKPGGSLRLSCAASGFNFNTYAMNWVRQAPGKGLEWVARIRSKSNNYATYYAAPVKGRFTISRDDSKNTLYLQMNSLKTEDTAVYYCVRHYSNYGWGFAYWGQGTLVTVSS

SEQ ID NO: 1373 - protein, 122 aa, Artificial Sequence
  Description of Artificial Sequence: Synthetic polypeptide
  Synthetic Construct
EVQLVESGGGLVQPGGSLRLSCAASGFNFNTYAMNWVRQAPGKGLEWVARIRSKSNNYATYYADSVKGRFTISRDNAKNSLYLQMNSLRAEDTAVYYCVRHYSNYGWGFAYWGQGTLVTVSS

SEQ ID NO: 1374 - protein, 122 aa, Artificial Sequence
  Description of Artificial Sequence: Synthetic polypeptide
  Synthetic Construct
EVQLLESGGGLVQPGGSLRLSCAASGFNFNTYAMNWVRQAPGKGLEWVARIRSKSNNYATYYADSVKGRFTISRDNSKNTLYLQMNSLRAEDTAVYYCVRHYSNYGWGFAYWGQGTLVTVSS

SEQ ID NO: 1375 - protein, 122 aa, Artificial Sequence
  Description of Artificial Sequence: Synthetic polypeptide
  Synthetic Construct
QVQLVESGGGVVQPGRSLRLSCAASGFNFNTYAMNWVRQAPGKGLEWVARIRSKSNNYATYYADSVKGRFTISRDNSKNTLYLQMNSLRAEDTAVYYCVRHYSNYGWGFAYWGQGTLVTVSS

SEQ ID NO: 1376 - protein, 122 aa, Artificial Sequence
  Description of Artificial Sequence: Synthetic polypeptide
  Synthetic Construct
QVQLVQSGAEVKKPGSSVKVSCKASGFNFNTYAMNWVRQAPGQGLEWVARIRSKSNNYATYYAQKFQGRVTITADESTSTAYMELSSLRSEDTAVYYCVRHYSNYGWGFAYWGQGTLVTVSS

SEQ ID NO: 1377 - protein, 122 aa, Artificial Sequence
  Description of Artificial Sequence: Synthetic polypeptide
  Synthetic Construct
QVQLVQSGAEVKKPGASVKVSCKASGFNFNTYAMNWVRQAPGQGLEWVARIRSKSNNYATYYAQKFQGRVTMTRDTSTSTVYMELSSLRSEDTAVYYCVRHYSNYGWGFAYWGQGTLVTVSS

SEQ ID NO: 1378 - protein, 122 aa, Artificial Sequence
  Description of Artificial Sequence: Synthetic polypeptide
  Synthetic Construct
EVQLVQSGAEVKKPGESLKISCKGSGFNFNTYAMNWVRQMPGKGLEWVARIRSKSNNYATYYAPSFQGQVTISADKSISTAYLQWSSLKASDTAMYYCVRHYSNYGWGFAYWGQGTLVTVSS

SEQ ID NO: 1379 - protein, 122 aa, Artificial Sequence
  Description of Artificial Sequence: Synthetic polypeptide
  Synthetic Construct
QVQLQESGPGLVKPSETLSLTCTVSGFNFNTYAMNWIRQPPGKGLEWVARIRSKSNNYATYYAPSLKSRVTISVDTSKNQFSLKLSSVTAADTAVYYCVRHYSNYGWGFAYWGQGTLVTVSS

SEQ ID NO: 1380 - protein, 122 aa, Artificial Sequence
  Description of Artificial Sequence: Synthetic polypeptide
  Synthetic Construct
QLQLQESGPGLVKPSETLSLTCTVSGFNFNTYAMNWIRQPPGKGLEWVARIRSKSNNYATYYAPSLKSRVTISVDTSKNQFSLKLSSVTAADTAVYYCVRHYSNYGWGFAYWGQGTLVTVSS

SEQ ID NO: 1381 - protein, 113 aa, Artificial Sequence
  Description of Artificial Sequence: Synthetic polypeptide
  Synthetic Construct
  MOD_RES (95)..(95): Glutamic acid or Glutamine
QVQLQQYGPELVKPGASVKMSCKVSGYTFSDYYIHWMKQSHGKSLEWIGYIYPNNGDNGYNQEFKGKATLTVDKSSSTAYMELRSLTFEDSAVYXCARRGYYGGSYDYWGQGT

SEQ ID NO: 1382 - protein, 119 aa, Artificial Sequence
  Description of Artificial Sequence: Synthetic polypeptide
  Synthetic Construct
QVQLVQSGAEVKKPGASVKVSCKASGYTFSDYYIHWVRQAPGQGLEWIGYIYPNNGDNGYNQKFQGRVTMTRDTSTSTVYMELSSLRSEDTAVYYCARRGYYGGSYDYWGQGTLVTVSS

SEQ ID NO: 1383 - protein, 119 aa, Artificial Sequence
  Description of Artificial Sequence: Synthetic polypeptide
  Synthetic Construct
EVQLVQSGAEVKKPGESLKISCKGSGYTFSDYYIHWVRQMPGKGLEWIGYIYPNNGDNGYNPSFQGQVTISADKSISTAYLQWSSLKASDTAMYYCARRGYYGGSYDYWGQGTLVTVSS

SEQ ID NO: 1384 - protein, 119 aa, Artificial Sequence
  Description of Artificial Sequence: Synthetic polypeptide
  Synthetic Construct
QVQLVQSGAEVKKPGSSVKVSCKASGYTFSDYYIHWVRQAPGQGLEWIGYIYPNNGDNGYNQKFQGRVTITADESTSTAYMELSSLRSEDTAVYYCARRGYYGGSYDYWGQGTLVTVSS

SEQ ID NO: 1385 - protein, 119 aa, Artificial Sequence
  Description of Artificial Sequence: Synthetic polypeptide
  Synthetic Construct
EVQLVESGGGLVQPGGSLRLSCAASGYTFSDYYIHWVRQAPGKGLEWIGYIYPNNGDNGYNDSVKGRFTISRDNAKNSLYLQMNSLRAEDTAVYYCARRGYYGGSYDYWGQGTLVTVSS

SEQ ID NO: 1386 - protein, 119 aa, Artificial Sequence
  Description of Artificial Sequence: Synthetic polypeptide
  Synthetic Construct
QVQLVESGGGVVQPGRSLRLSCAASGYTFSDYYIHWVRQAPGKGLEWIGYIYPNNGDNGYNDSVKGRFTISRDNSKNTLYLQMNSLRAEDTAVYYCARRGYYGGSYDYWGQGTLVTVSS

SEQ ID NO: 1387 - protein, 119 aa, Artificial Sequence
  Description of Artificial Sequence: Synthetic polypeptide
  Synthetic Construct
EVQLLESGGGLVQPGGSLRLSCAASGYTFSDYYIHWVRQAPGKGLEWIGYIYPNNGDNGYNDSVKGRFTISRDNSKNTLYLQMNSLRAEDTAVYYCARRGYYGGSYDYWGQGTLVTVSS

SEQ ID NO: 1388 - protein, 119 aa, Artificial Sequence
  Description of Artificial Sequence: Synthetic polypeptide
  Synthetic Construct
QVQLQESGPGLVKPSETLSLTCTVSGYTFSDYYIHWIRQPPGKGLEWIGYIYPNNGDNGYNPSLKSRVTISVDTSKNQFSLKLSSVTAADTAVYYCARRGYYGGSYDYWGQGTLVTVSS

SEQ ID NO: 1389 - protein, 119 aa, Artificial Sequence
  Description of Artificial Sequence: Synthetic polypeptide
  Synthetic Construct
EVQLVESGGGLVKPGGSLRLSCAASGYTFSDYYIHWVRQAPGKGLEWIGYIYPNNGDNGYNAPVKGRFTISRDDSKNTLYLQMNSLKTEDTAVYYCARRGYYGGSYDYWGQGTLVTVSS

SEQ ID NO: 1390 - protein, 119 aa, Artificial Sequence
  Description of Artificial Sequence: Synthetic polypeptide
  Synthetic Construct
QVQLQESGPGLVKPSQTLSLTCTVSGYTFSDYYIHWIRQPPGKGLEWIGYIYPNNGDNGYNPSLKSRVTISVDTSKNQFSLKLSSVTAADTAVYYCARRGYYGGSYDYWGQGTLVTVSS

SEQ ID NO: 1391 - protein, 113 aa, Artificial Sequence
  Description of Artificial Sequence: Synthetic polypeptide
  Synthetic Construct
WRIGQGKGSLKLARAARGFRFNTYAMTRVRQGPGKGREWEGVIRRKSSNFATLYADSVKDRFRASRDDSESMLYVQMSNWKQEDTAMYYGVRHKSNKYPFVYWGQGTLVTVSA

SEQ ID NO: 1392 - protein, 121 aa, Artificial Sequence
  Description of Artificial Sequence: Synthetic polypeptide
  Synthetic Construct
EVQLVESGGGLVKPGGSLRLSCAASGFRFNTYAMTWVRQAPGKGLEWEGVIRRKSSNFATLYAAPVKGRFTISRDDSKNTLYLQMNSLKTEDTAVYYCVRHKSNKYPFVYWGQGTLVTVSS

SEQ ID NO: 1393 - protein, 121 aa, Artificial Sequence
  Description of Artificial Sequence: Synthetic polypeptide
  Synthetic Construct
EVQLLESGGGLVQPGGSLRLSCAASGFRFNTYAMTWVRQAPGKGLEWEGVIRRKSSNFATLYADSVKGRFTISRDNSKNTLYLQMNSLRAEDTAVYYCVRHKSNKYPFVYWGQGTLVTVSS

SEQ ID NO: 1394 - protein, 121 aa, Artificial Sequence
  Description of Artificial Sequence: Synthetic polypeptide
  Synthetic Construct
EVQLVESGGGLVQPGGSLRLSCAASGFRFNTYAMTWVRQAPGKGLEWEGVIRRKSSNFATLYADSVKGRFTISRDNAKNSLYLQMNSLRAEDTAVYYCVRHKSNKYPFVYWGQGTLVTVSS

SEQ ID NO: 1395 - protein, 121 aa, Artificial Sequence
  Description of Artificial Sequence: Synthetic polypeptide
  Synthetic Construct
QVQLVESGGGVVQPGRSLRLSCAASGFRFNTYAMTWVRQAPGKGLEWEGVIRRKSSNFATLYADSVKGRFTISRDNSKNTLYLQMNSLRAEDTAVYYCVRHKSNKYPFVYWGQGTLVTVSS

SEQ ID NO: 1396 - protein, 121 aa, Artificial Sequence
  Description of Artificial Sequence: Synthetic polypeptide
  Synthetic Construct
QVQLVQSGAEVKKPGSSVKVSCKASGFRFNTYAMTWVRQAPGQGLEWEGVIRRKSSNFATLYAQKFQGRVTITADESTSTAYMELSSLRSEDTAVYYCVRHKSNKYPFVYWGQGTLVTVSS

SEQ ID NO: 1397 - protein, 121 aa, Artificial Sequence
  Description of Artificial Sequence: Synthetic polypeptide
  Synthetic Construct
QVQLVQSGAEVKKPGASVKVSCKASGFRFNTYAMTWVRQAPGQGLEWEGVIRRKSSNFATLYAQKFQGRVTMTRDTSTSTVYMELSSLRSEDTAVYYCVRHKSNKYPFVYWGQGTLVTVSS

SEQ ID NO: 1398 - protein, 121 aa, Artificial Sequence
  Description of Artificial Sequence: Synthetic polypeptide
  Synthetic Construct
EVQLVQSGAEVKKPGESLKISCKGSGFRFNTYAMTWVRQMPGKGLEWEGVIRRKSSNFATLYAPSFQGQVTISADKSISTAYLQWSSLKASDTAMYYCVRHKSNKYPFVYWGQGTLVTVSS

SEQ ID NO: 1399 - protein, 121 aa, Artificial Sequence
  Description of Artificial Sequence: Synthetic polypeptide
  Synthetic Construct
QVQLQESGPGLVKPSETLSLTCTVSGFRFNTYAMTWIRQPPGKGLEWEGVIRRKSSNFATLYAPSLKSRVTISVDTSKNQFSLKLSSVTAADTAVYYCVRHKSNKYPFVYWGQGTLVTVSS

SEQ ID NO: 1400 - protein, 121 aa, Artificial Sequence
  Description of Artificial Sequence: Synthetic polypeptide
  Synthetic Construct
QLQLQESGPGLVKPSETLSLTCTVSGFRFNTYAMTWIRQPPGKGLEWEGVIRRKSSNFATLYAPSLKSRVTISVDTSKNQFSLKLSSVTAADTAVYYCVRHKSNKYPFVYWGQGTLVTVSS

SEQ ID NO: 1401 - protein, 17 aa, Artificial Sequence
  Description of Artificial Sequence: Synthetic peptide
  Synthetic Construct
KSSQSVFYSSNQKNYLA

SEQ ID NO: 1402 - protein, 8 aa, Artificial Sequence
  Description of Artificial Sequence: Synthetic peptide
  Synthetic Construct
HQYLSSLT

SEQ ID NO: 1403 - protein, 9 aa, Artificial Sequence
  Description of Artificial Sequence: Synthetic peptide
  Synthetic Construct
SQSTHVPPT

SEQ ID NO: 1404 - protein, 9 aa, Artificial Sequence
  Description of Artificial Sequence: Synthetic peptide
  Synthetic Construct
YSFTGYYMH

SEQ ID NO: 1405 - protein, 16 aa, Artificial Sequence
  Description of Artificial Sequence: Synthetic peptide
  Synthetic Construct
VAEIRNKINNHATYYA

SEQ ID NO: 1406 - protein, 14 aa, Artificial Sequence
  Description of Artificial Sequence: Synthetic peptide
  Synthetic Construct
IGGINPNNGGTSYK

SEQ ID NO: 1407 - protein, 14 aa, Artificial Sequence
  Description of Artificial Sequence: Synthetic peptide
  Synthetic Construct
IGRVNPNNGGTSYN

SEQ ID NO: 1408 - protein, 13 aa, Artificial Sequence
  Description of Artificial Sequence: Synthetic peptide
  Synthetic Construct
TSLYDGSYLRFAY

SEQ ID NO: 1409 - protein, 9 aa, Artificial Sequence
  Description of Artificial Sequence: Synthetic peptide
  Synthetic Construct
VLTGGYFDY

SEQ ID NO: 1410 - protein, 20 aa, Artificial Sequence
  Description of Artificial Sequence: Synthetic peptide
  Synthetic Construct
QTQSPSSLAVSAGEKVTLSC

SEQ ID NO: 1411 - protein, 40 aa, Artificial Sequence
  Description of Artificial Sequence: Synthetic polypeptide
  Synthetic Construct
QTQVFLSLLLWVSGTCGNIMLTQSPSSLAVSAGEKVTLSC

SEQ ID NO: 1412 - protein, 23 aa, Artificial Sequence
  Description of Artificial Sequence: Synthetic peptide
  Synthetic Construct
DIVMSQSPSSLAVSVGEKVTMSC

SEQ ID NO: 1413 - protein, 15 aa, Artificial Sequence
  Description of Artificial Sequence: Synthetic peptide
  Synthetic Construct
WYQQKPGQSPKLLIS

SEQ ID NO: 1414 - protein, 32 aa, Artificial Sequence
  Description of Artificial Sequence: Synthetic polypeptide
  Synthetic Construct
GVPDRFTGSGFGTDFTLTISSVQGEDLAVYYC

SEQ ID NO: 1415 - protein, 32 aa, Artificial Sequence
  Description of Artificial Sequence: Synthetic polypeptide
  Synthetic Construct
GVPDRFTGSGSGTDFTLTINSVQAEDLAVYYC

SEQ ID NO: 1416 - protein, 30 aa, Artificial Sequence
  Description of Artificial Sequence: Synthetic polypeptide
  Synthetic Construct
GVQSEVKFEESGGGLVQPGGSMKLSCTASG

SEQ ID NO: 1417 - protein, 26 aa, Artificial Sequence
  Description of Artificial Sequence: Synthetic peptide
  Synthetic Construct
QVQLQQSGPELVKPGASVKISCKTSG

SEQ ID NO: 1418 - protein, 26 aa, Artificial Sequence
  Description of Artificial Sequence: Synthetic peptide
  Synthetic Construct
QVQLQQSGPDLVKPGASVKISCKASG

SEQ ID NO: 1419 - protein, 35 aa, Artificial Sequence
  Description of Artificial Sequence: Synthetic polypeptide
  Synthetic Construct
ESVKGRFTISRDDSKSSVSLQMNSLRTEDTGIYYC

SEQ ID NO: 1420 - protein, 35 aa, Artificial Sequence
  Description of Artificial Sequence: Synthetic polypeptide
  Synthetic Construct
QKFKGKATLTVDRSSSTAYMELRSLTSEDSAVYYC

SEQ ID NO: 1421 - protein, 35 aa, Artificial Sequence
  Description of Artificial Sequence: Synthetic polypeptide
  Synthetic Construct
QKFKGKAILTVDKSSSTAYMELRSLTSEDSAVYYC

SEQ ID NO: 1422 - protein, 129 aa, Artificial Sequence
  Description of Artificial Sequence: Synthetic polypeptide
  Synthetic Construct
QTQVFLSLLLWVSGTCGNIMLTQSPSSLAVSAGEKVTLSCKSSQSVFYSSNQKNYLAWYQQKPGQSPKLLISWASTRESGVPDRFTGSGSGTDFTLTINSVQAEDLAVYYCHQYLSSLTFGAGTKLELK

SEQ ID NO: 1423 - protein, 112 aa, Artificial Sequence
  Description of Artificial Sequence: Synthetic polypeptide
  Synthetic Construct
DIVMTQSPDSLAVSLGERATINCKSSQSVFYSSNQKNYLAWYQQKPGQPPKLLIYWASTRESGVPDRFSGSGSGTDFTLTISSLQAEDVAVYYCHQYLSSLTFGQGTKVEIK

SEQ ID NO: 1424 - protein, 112 aa, Artificial Sequence
  Description of Artificial Sequence: Synthetic polypeptide
  Synthetic Construct
DVVMTQSPLSLPVTLGQPASISCKSSQSVFYSSNQKNYLAWFQQRPGQSPRRLIYWASTRESGVPDRFSGSGSGTDFTLKISRVEAEDVGVYYCHQYLSSLTFGQGTKVEIK

SEQ ID NO: 1425 - protein, 112 aa, Artificial Sequence
  Description of Artificial Sequence: Synthetic polypeptide
  Synthetic Construct
DIVMTQSPLSLPVTPGEPASISCKSSQSVFYSSNQKNYLAWYLQKPGQSPQLLIYWASTRESGVPDRFSGSGSGTDFTLKISRVEAEDVGVYYCHQYLSSLTFGQGTKVEIK

SEQ ID NO: 1426 - protein, 112 aa, Artificial Sequence
  Description of Artificial Sequence: Synthetic polypeptide
  Synthetic Construct
DIQMTQSPSTLSASVGDRVTITCKSSQSVFYSSNQKNYLAWYQQKPGKAPKLLIYWASTRESGVPSRFSGSGSGTEFTLTISSLQPDDFATYYCHQYLSSLTFGQGTKVEIK

SEQ ID NO: 1427 - protein, 112 aa, Artificial Sequence
  Description of Artificial Sequence: Synthetic polypeptide
  Synthetic Construct
EIVMTQSPATLSVSPGERATLSCKSSQSVFYSSNQKNYLAWYQQKPGQAPRLLIYWASTRESGIPARFSGSGSGTEFTLTISSLQSEDFAVYYCHQYLSSLTFGQGTKVEIK

SEQ ID NO: 1428 - protein, 112 aa, Artificial Sequence
  Description of Artificial Sequence: Synthetic polypeptide
  Synthetic Construct
DIQLTQSPSFLSASVGDRVTITCKSSQSVFYSSNQKNYLAWYQQKPGKAPKLLIYWASTRESGVPSRFSGSGSGTEFTLTISSLQPEDFATYYCHQYLSSLTFGQGTKVEIK

SEQ ID NO: 1429 - protein, 112 aa, Artificial Sequence
  Description of Artificial Sequence: Synthetic polypeptide
  Synthetic Construct
EIVLTQSPATLSLSPGERATLSCKSSQSVFYSSNQKNYLAWYQQKPGQAPRLLIYWASTRESGIPARFSGSGSGTDFTLTISSLEPEDFAVYYCHQYLSSLTFGQGTKVEIK

SEQ ID NO: 1430 - protein, 112 aa, Artificial Sequence
  Description of Artificial Sequence: Synthetic polypeptide
  Synthetic Construct
DIQMTQSPSSLSASVGDRVTITCKSSQSVFYSSNQKNYLAWYQQKPGKAPKLLIYWASTRESGVPSRFSGSGSGTDFTLTISSLQPEDFATYYCHQYLSSLTFGQGTKVEIK

SEQ ID NO: 1431 - protein, 112 aa, Artificial Sequence
  Description of Artificial Sequence: Synthetic polypeptide
  Synthetic Construct
DIQMTQSPSSLSASVGDRVTITCKSSQSVFYSSNQKNYLAWYQQKPGKAPKLLIYWASTRESGVPSRFSGSGSGTDFTFTISSLQPEDIATYYCHQYLSSLTFGQGTKVEIK

SEQ ID NO: 1432 - protein, 112 aa, Artificial Sequence
  Description of Artificial Sequence: Synthetic polypeptide
  Synthetic Construct
EIVLTQSPGTLSLSPGERATLSCKSSQSVFYSSNQKNYLAWYQQKPGQAPRLLIYWASTRESGIPDRFSGSGSGTDFTLTISRLEPEDFAVYYCHQYLSSLTFGQGTKVEIK

SEQ ID NO: 1433 - protein, 113 aa, Artificial Sequence
  Description of Artificial Sequence: Synthetic polypeptide
  Synthetic Construct
DIVMSQSPSSLAVSVGEKVTMSCKSSQSLLYSSNQKNCLAWYQQKPGQSPKLLIYWASTRESGVPDRFTGSGSGTDFTLTISSVKAEDLAVYYCQQYYSYPLTFGAGTKLELK

SEQ ID NO: 1434 - protein, 113 aa, Artificial Sequence
  Description of Artificial Sequence: Synthetic polypeptide
  Synthetic Construct
DIVMTQSPDSLAVSLGERATINCKSSQSLLYSSNQKNCLAWYQQKPGQPPKLLIYWASTRESGVPDRFSGSGSGTDFTLTISSLQAEDVAVYYCQQYYSYPLTFGQGTKVEIK

SEQ ID NO: 1435 - protein, 113 aa, Artificial Sequence
  Description of Artificial Sequence: Synthetic polypeptide
  Synthetic Construct
DIVMTQSPLSLPVTPGEPASISCKSSQSLLYSSNQKNCLAWYLQKPGQSPQLLIYWASTRESGVPDRFSGSGSGTDFTLKISRVEAEDVGVYYCQQYYSYPLTFGQGTKVEIK

SEQ ID NO: 1436 - protein, 113 aa, Artificial Sequence
  Description of Artificial Sequence: Synthetic polypeptide
  Synthetic Construct
DVVMTQSPLSLPVTLGQPASISCKSSQSLLYSSNQKNCLAWFQQRPGQSPRRLIYWASTRESGVPDRFSGSGSGTDFTLKISRVEAEDVGVYYCQQYYSYPLTFGQGTKVEIK

SEQ ID NO: 1437 - protein, 113 aa, Artificial Sequence
  Description of Artificial Sequence: Synthetic polypeptide
  Synthetic Construct
DIQLTQSPSFLSASVGDRVTITCKSSQSLLYSSNQKNCLAWYQQKPGKAPKLLIYWASTRESGVPSRFSGSGSGTEFTLTISSLQPEDFATYYCQQYYSYPLTFGQGTKVEIK

SEQ ID NO: 1438 - protein, 113 aa, Artificial Sequence
  Description of Artificial Sequence: Synthetic polypeptide
  Synthetic Construct
EIVMTQSPATLSVSPGERATLSCKSSQSLLYSSNQKNCLAWYQQKPGQAPRLLIYWASTRESGIPARFSGSGSGTEFTLTISSLQSEDFAVYYCQQYYSYPLTFGQGTKVEIK

SEQ ID NO: 1439 - protein, 113 aa, Artificial Sequence
  Description of Artificial Sequence: Synthetic polypeptide
  Synthetic Construct
DIQMTQSPSTLSASVGDRVTITCKSSQSLLYSSNQKNCLAWYQQKPGKAPKLLIYWASTRESGVPSRFSGSGSGTEFTLTISSLQPDDFATYYCQQYYSYPLTFGQGTKVEIK

SEQ ID NO: 1440 - protein, 113 aa, Artificial Sequence
  Description of Artificial Sequence: Synthetic polypeptide
  Synthetic Construct
DIQMTQSPSSLSASVGDRVTITCKSSQSLLYSSNQKNCLAWYQQKPGKAPKLLIYWASTRESGVPSRFSGSGSGTDFTFTISSLQPEDIATYYCQQYYSYPLTFGQGTKVEIK

SEQ ID NO: 1441 - protein, 113 aa, Artificial Sequence
  Description of Artificial Sequence: Synthetic polypeptide
  Synthetic Construct
DIQMTQSPSSLSASVGDRVTITCKSSQSLLYSSNQKNCLAWYQQKPGKAPKLLIYWASTRESGVPSRFSGSGSGTDFTLTISSLQPEDFATYYCQQYYSYPLTFGQGTKVEIK

SEQ ID NO: 1442 - protein, 113 aa, Artificial Sequence
  Description of Artificial Sequence: Synthetic polypeptide
  Synthetic Construct
EIVLTQSPATLSLSPGERATLSCKSSQSLLYSSNQKNCLAWYQQKPGQAPRLLIYWASTRESGIPARFSGSGSGTDFTLTISSLEPEDFAVYYCQQYYSYPLTFGQGTKVEIK

SEQ ID NO: 1443 - protein, 113 aa, Artificial Sequence
  Description of Artificial Sequence: Synthetic polypeptide
  Synthetic Construct
EIVLTQSPGTLSLSPGERATLSCKSSQSLLYSSNQKNCLAWYQQKPGQAPRLLIYWASTRESGIPDRFSGSGSGTDFTLTISRLEPEDFAVYYCQQYYSYPLTFGQGTKVEIK

SEQ ID NO: 1444 - protein, 112 aa, Artificial Sequence
  Description of Artificial Sequence: Synthetic polypeptide
  Synthetic Construct
DVVMTQTPLSLPVSLGDQASISCRSSQSLVHSNGNTYLHWYLQKPGQSPKLLIYKVSNRFSGVPDRFSGSGSGTDFTLKISRVEAEDLGVYFCSQSTHVPPTFGSGTKLEIK

SEQ ID NO: 1445 - protein, 112 aa, Artificial Sequence
  Description of Artificial Sequence: Synthetic polypeptide
  Synthetic Construct
DVVMTQSPLSLPVTLGQPASISCRSSQSLVHSNGNTYLHWFQQRPGQSPRRLIYKVSNRFSGVPDRFSGSGSGTDFTLKISRVEAEDVGVYYCSQSTHVPPTFGQGTKVEIK

SEQ ID NO: 1446 - protein, 112 aa, Artificial Sequence
  Description of Artificial Sequence: Synthetic polypeptide
  Synthetic Construct
DIVMTQSPLSLPVTPGEPASISCRSSQSLVHSNGNTYLHWYLQKPGQSPQLLIYKVSNRFSGVPDRFSGSGSGTDFTLKISRVEAEDVGVYYCSQSTHVPPTFGQGTKVEIK

SEQ ID NO: 1447 - protein, 112 aa, Artificial Sequence
  Description of Artificial Sequence: Synthetic polypeptide
  Synthetic Construct
DIVMTQSPDSLAVSLGERATINCRSSQSLVHSNGNTYLHWYQQKPGQPPKLLIYKVSNRFSGVPDRFSGSGSGTDFTLTISSLQAEDVAVYYCSQSTHVPPTFGQGTKVEIK

SEQ ID NO: 1448 - protein, 112 aa, Artificial Sequence
  Description of Artificial Sequence: Synthetic polypeptide
  Synthetic Construct
EIVLTQSPATLSLSPGERATLSCRSSQSLVHSNGNTYLHWYQQKPGQAPRLLIYKVSNRFSGIPARFSGSGSGTDFTLTISSLEPEDFAVYYCSQSTHVPPTFGQGTKVEIK

SEQ ID NO: 1449 - protein, 112 aa, Artificial Sequence
  Description of Artificial Sequence: Synthetic polypeptide
  Synthetic Construct
DIQMTQSPSSLSASVGDRVTITCRSSQSLVHSNGNTYLHWYQQKPGKAPKLLIYKVSNRFSGVPSRFSGSGSGTDFTFTISSLQPEDIATYYCSQSTHVPPTFGQGTKVEIK

SEQ ID NO: 1450 - protein, 112 aa, Artificial Sequence
  Description of Artificial Sequence: Synthetic polypeptide
  Synthetic Construct
DIQMTQSPSTLSASVGDRVTITCRSSQSLVHSNGNTYLHWYQQKPGKAPKLLIYKVSNRFSGVPSRFSGSGSGTEFTLTISSLQPDDFATYYCSQSTHVPPTFGQGTKVEIK

SEQ ID NO: 1451 - protein, 112 aa, Artificial Sequence
  Description of Artificial Sequence: Synthetic polypeptide
  Synthetic Construct
DIQMTQSPSSLSASVGDRVTITCRSSQSLVHSNGNTYLHWYQQKPGKAPKLLIYKVSNRFSGVPSRFSGSGSGTDFTLTISSLQPEDFATYYCSQSTHVPPTFGQGTKVEIK

SEQ ID NO: 1452 - protein, 112 aa, Artificial Sequence
  Description of Artificial Sequence: Synthetic polypeptide
  Synthetic Construct
DIQLTQSPSFLSASVGDRVTITCRSSQSLVHSNGNTYLHWYQQKPGKAPKLLIYKVSNRFSGVPSRFSGSGSGTEFTLTISSLQPEDFATYYCSQSTHVPPTFGQGTKVEIK

SEQ ID NO: 1453 - protein, 112 aa, Artificial Sequence
  Description of Artificial Sequence: Synthetic polypeptide
  Synthetic Construct
EIVMTQSPATLSVSPGERATLSCRSSQSLVHSNGNTYLHWYQQKPGQAPRLLIYKVSNRFSGIPARFSGSGSGTEFTLTISSLQSEDFAVYYCSQSTHVPPTFGQGTKVEIK

SEQ ID NO: 1454 - protein, 112 aa, Artificial Sequence
  Description of Artificial Sequence: Synthetic polypeptide
  Synthetic Construct
EIVLTQSPGTLSLSPGERATLSCRSSQSLVHSNGNTYLHWYQQKPGQAPRLLIYKVSNRFSGIPDRFSGSGSGTDFTLTISRLEPEDFAVYYCSQSTHVPPTFGQGTKVEIK

SEQ ID NO: 1455 - protein, 117 aa, Artificial Sequence; identical to SEQ ID NO: 1175
  Description of Artificial Sequence: Synthetic polypeptide
  Synthetic Construct

SEQ ID NO: 1456 - protein, 121 aa, Artificial Sequence
  Description of Artificial Sequence: Synthetic polypeptide
  Synthetic Construct
EVQLVESGGGLVKPGGSLRLSCAASGFNFNTYAMKWVRQAPGKGLEWIARIRSNSNDYATNYSAPVKGRFTISRDDSKNTLYLQMNSLKTEDTAVYYCVGHKINNYPFAHWGQGTLVTVSS

SEQ ID NO: 1457 - protein, 121 aa, Artificial Sequence
  Description of Artificial Sequence: Synthetic polypeptide
  Synthetic Construct
EVQLLESGGGLVQPGGSLRLSCAASGFNFNTYAMKWVRQAPGKGLEWIARIRSNSNDYATNYSDSVKGRFTISRDNSKNTLYLQMNSLRAEDTAVYYCVGHKINNYPFAHWGQGTLVTVSS

SEQ ID NO: 1458 - protein, 121 aa, Artificial Sequence
  Description of Artificial Sequence: Synthetic polypeptide
  Synthetic Construct
QVQLVESGGGVVQPGRSLRLSCAASGFNFNTYAMKWVRQAPGKGLEWIARIRSNSNDYATNYSDSVKGRFTISRDNSKNTLYLQMNSLRAEDTAVYYCVGHKINNYPFAHWGQGTLVTVSS

SEQ ID NO: 1459 - protein, 121 aa, Artificial Sequence
  Description of Artificial Sequence: Synthetic polypeptide
  Synthetic Construct
EVQLVESGGGLVQPGGSLRLSCAASGFNFNTYAMKWVRQAPGKGLEWIARIRSNSNDYATNYSDSVKGRFTISRDNAKNSLYLQMNSLRAEDTAVYYCVGHKINNYPFAHWGQGTLVTVSS

SEQ ID NO: 1460 - protein, 121 aa, Artificial Sequence; identical to SEQ ID NO: 1459
  Description of Artificial Sequence: Synthetic polypeptide
  Synthetic Construct

SEQ ID NO: 1461 - protein, 121 aa, Artificial Sequence
  Description of Artificial Sequence: Synthetic polypeptide
  Synthetic Construct
QVQLVQSGAEVKKPGSSVKVSCKASGFNFNTYAMKWVRQAPGQGLEWIARIRSNSNDYATNYSQKFQGRVTITADESTSTAYMELSSLRSEDTAVYYCVGHKINNYPFAHWGQGTLVTVSS

SEQ ID NO: 1462 - protein, 121 aa, Artificial Sequence
  Description of Artificial Sequence: Synthetic polypeptide
  Synthetic Construct
QVQLVQSGAEVKKPGASVKVSCKASGFNFNTYAMKWVRQAPGQGLEWIARIRSNSNDYATNYSQKFQGRVTMTRDTSTSTVYMELSSLRSEDTAVYYCVGHKINNYPFAHWGQGTLVTVSS

SEQ ID NO: 1463 - protein, 121 aa, Artificial Sequence
  Description of Artificial Sequence: Synthetic polypeptide
  Synthetic Construct
EVQLVQSGAEVKKPGESLKISCKGSGFNFNTYAMKWVRQMPGKGLEWIARIRSNSNDYATNYSPSFQGQVTISADKSISTAYLQWSSLKASDTAMYYCVGHKINNYPFAHWGQGTLVTVSS

SEQ ID NO: 1464 - protein, 121 aa, Artificial Sequence
  Description of Artificial Sequence: Synthetic polypeptide
  Synthetic Construct
QVQLQESGPGLVKPSETLSLTCTVSGFNFNTYAMKWIRQPPGKGLEWIARIRSNSNDYATNYSPSLKSRVTISVDTSKNQFSLKLSSVTAADTAVYYCVGHKINNYPFAHWGQGTLVTVSS

SEQ ID NO: 1465 - protein, 121 aa, Artificial Sequence
  Description of Artificial Sequence: Synthetic polypeptide
  Synthetic Construct
QVQLQESGPGLVKPSQTLSLTCTVSGFNFNTYAMKWIRQPPGKGLEWIARIRSNSNDYATNYSPSLKSRVTISVDTSKNQFSLKLSSVTAADTAVYYCVGHKINNYPFAHWGQGTLVTVSS

SEQ ID NO: 1466 - protein, 126 aa, Artificial Sequence
  Description of Artificial Sequence: Synthetic polypeptide
  Synthetic Construct
GVQSEVKFEESGGGLVQPGGSMKLSCTASGFTFSDAWMDWVRQSPEKGLEWVAEIRNKINNHATYYAESVKGRFTISRDDSKSSVSLQMNSLRTEDTGIYYCTSLYDGSYLRFAYWGQGTLVTVSA

SEQ ID NO: 1467 - protein, 122 aa, Artificial Sequence
  Description of Artificial Sequence: Synthetic polypeptide
  Synthetic Construct
EVQLVESGGGLVKPGGSLRLSCAASGFTFSDAWMDWVRQAPGKGLEWVAEIRNKINNHATYYAAPVKGRFTISRDDSKNTLYLQMNSLKTEDTAVYYCTSLYDGSYLRFAYWGQGTLVTVSS

SEQ ID NO: 1468 - protein, 122 aa, Artificial Sequence
  Description of Artificial Sequence: Synthetic polypeptide
  Synthetic Construct
EVQLVESGGGLVQPGGSLRLSCAASGFTFSDAWMDWVRQAPGKGLEWVAEIRNKINNHATYYADSVKGRFTISRDNAKNSLYLQMNSLRAEDTAVYYCTSLYDGSYLRFAYWGQGTLVTVSS

SEQ ID NO: 1469 - protein, 122 aa, Artificial Sequence
  Description of Artificial Sequence: Synthetic polypeptide
  Synthetic Construct
EVQLLESGGGLVQPGGSLRLSCAASGFTFSDAWMDWVRQAPGKGLEWVAEIRNKINNHATYYADSVKGRFTISRDNSKNTLYLQMNSLRAEDTAVYYCTSLYDGSYLRFAYWGQGTLVTVSS

SEQ ID NO: 1470 - protein, 122 aa, Artificial Sequence
  Description of Artificial Sequence: Synthetic polypeptide
  Synthetic Construct
QVQLVESGGGVVQPGRSLRLSCAASGFTFSDAWMDWVRQAPGKGLEWVAEIRNKINNHATYYADSVKGRFTISRDNSKNTLYLQMNSLRAEDTAVYYCTSLYDGSYLRFAYWGQGTLVTVSS

SEQ ID NO: 1471 - protein, 122 aa, Artificial Sequence; identical to SEQ ID NO: 1468
  Description of Artificial Sequence: Synthetic polypeptide
  Synthetic Construct

SEQ ID NO: 1472 - protein, 122 aa, Artificial Sequence
  Description of Artificial Sequence: Synthetic polypeptide
  Synthetic Construct
QVQLVQSGAEVKKPGSSVKVSCKASGFTFSDAWMDWVRQAPGQGLEWVAEIRNKINNHATYYAQKFQGRVTITADESTSTAYMELSSLRSEDTAVYYCTSLYDGSYLRFAYWGQGTLVTVSS

SEQ ID NO: 1473 - protein, 122 aa, Artificial Sequence
  Description of Artificial Sequence: Synthetic polypeptide
  Synthetic Construct
QVQLVQSGAEVKKPGASVKVSCKASGFTFSDAWMDWVRQAPGQGLEWVAEIRNKINNHATYYAQKFQGRVTMTRDTSTSTVYMELSSLRSEDTAVYYCTSLYDGSYLRFAYWGQGTLVTVSS

SEQ ID NO: 1474 - protein, 122 aa, Artificial Sequence
  Description of Artificial Sequence: Synthetic polypeptide
  Synthetic Construct
EVQLVQSGAEVKKPGESLKISCKGSGFTFSDAWMDWVRQMPGKGLEWVAEIRNKINNHATYYAPSFQGQVTISADKSISTAYLQWSSLKASDTAMYYCTSLYDGSYLRFAYWGQGTLVTVSS

SEQ ID NO: 1475 - protein, 122 aa, Artificial Sequence
  Description of Artificial Sequence: Synthetic polypeptide
  Synthetic Construct
QVQLQESGPGLVKPSETLSLTCTVSGFTFSDAWMDWIRQPPGKGLEWVAEIRNKINNHATYYAPSLKSRVTISVDTSKNQFSLKLSSVTAADTAVYYCTSLYDGSYLRFAYWGQGTLVTVSS

SEQ ID NO: 1476 - protein, 122 aa, Artificial Sequence
  Description of Artificial Sequence: Synthetic polypeptide
  Synthetic Construct
QVQLQESGPGLVKPSQTLSLTCTVSGFTFSDAWMDWIRQPPGKGLEWVAEIRNKINNHATYYAPSLKSRVTISVDTSKNQFSLKLSSVTAADTAVYYCTSLYDGSYLRFAYWGQGTLVTVSS

SEQ ID NO: 1477 - protein, 119 aa, Artificial Sequence
  Description of Artificial Sequence: Synthetic polypeptide
  Synthetic Construct
QVQLQQSGPELVKPGASVKISCKTSGYTFTEYTMHWVKQSHGKSLEWIGGINPNNGGTSYKQKFKGKATLTVDRSSSTAYMELRSLTSEDSAVYYCARGGSHYYAMDYWGQGTSVTVSS

SEQ ID NO: 1478 - protein, 119 aa, Artificial Sequence
  Description of Artificial Sequence: Synthetic polypeptide
  Synthetic Construct
QVQLVQSGAEVKKPGASVKVSCKASGYTFTEYTMHWVRQAPGQGLEWIGGINPNNGGTSYKQKFQGRVTMTRDTSTSTVYMELSSLRSEDTAVYYCARGGSHYYAMDYWGQGTLVTVSS

SEQ ID NO: 1479 - protein, 119 aa, Artificial Sequence
  Description of Artificial Sequence: Synthetic polypeptide
  Synthetic Construct
QVQLVQSGAEVKKPGSSVKVSCKASGYTFTEYTMHWVRQAPGQGLEWIGGINPNNGGTSYKQKFQGRVTITADESTSTAYMELSSLRSEDTAVYYCARGGSHYYAMDYWGQGTLVTVSS

SEQ ID NO: 1480 - protein, 119 aa, Artificial Sequence
  Description of Artificial Sequence: Synthetic polypeptide
  Synthetic Construct
EVQLVQSGAEVKKPGESLKISCKGSGYTFTEYTMHWVRQMPGKGLEWIGGINPNNGGTSYKPSFQGQVTISADKSISTAYLQWSSLKASDTAMYYCARGGSHYYAMDYWGQGTLVTVSS

SEQ ID NO: 1481 - protein, 119 aa, Artificial Sequence
  Description of Artificial Sequence: Synthetic polypeptide
  Synthetic Construct
EVQLLESGGGLVQPGGSLRLSCAASGYTFTEYTMHWVRQAPGKGLEWIGGINPNNGGTSYKDSVKGRFTISRDNSKNTLYLQMNSLRAEDTAVYYCARGGSHYYAMDYWGQGTLVTVSS

SEQ ID NO: 1482 - protein, 119 aa, Artificial Sequence
  Description of Artificial Sequence: Synthetic polypeptide
  Synthetic Construct
QVQLVESGGGVVQPGRSLRLSCAASGYTFTEYTMHWVRQAPGKGLEWIGGINPNNGGTSYKDSVKGRFTISRDNSKNTLYLQMNSLRAEDTAVYYCARGGSHYYAMDYWGQGTLVTVSS

SEQ ID NO: 1483 - protein, 119 aa, Artificial Sequence
  Description of Artificial Sequence: Synthetic polypeptide
  Synthetic Construct
EVQLVESGGGLVQPGGSLRLSCAASGYTFTEYTMHWVRQAPGKGLEWIGGINPNNGGTSYKDSVKGRFTISRDNAKNSLYLQMNSLRAEDTAVYYCARGGSHYYAMDYWGQGTLVTVSS

SEQ ID NO: 1484 - protein, 119 aa, Artificial Sequence; identical to SEQ ID NO: 1483
  Description of Artificial Sequence: Synthetic polypeptide
  Synthetic Construct

SEQ ID NO: 1485 - protein, 119 aa, Artificial Sequence
  Description of Artificial Sequence: Synthetic polypeptide
  Synthetic Construct
QVQLQESGPGLVKPSETLSLTCTVSGYTFTEYTMHWIRQPPGKGLEWIGGINPNNGGTSYKPSLKSRVTISVDTSKNQFSLKLSSVTAADTAVYYCARGGSHYYAMDYWGQGTLVTVSS

SEQ ID NO: 1486 - protein, 119 aa, Artificial Sequence
  Description of Artificial Sequence: Synthetic polypeptide
  Synthetic Construct
EVQLVESGGGLVKPGGSLRLSCAASGYTFTEYTMHWVRQAPGKGLEWIGGINPNNGGTSYKAPVKGRFTISRDDSKNTLYLQMNSLKTEDTAVYYCARGGSHYYAMDYWGQGTLVTVSS

SEQ ID NO: 1487 - protein, 119 aa, Artificial Sequence
  Description of Artificial Sequence: Synthetic polypeptide
  Synthetic Construct
QLQLQESGPGLVKPSETLSLTCTVSGYTFTEYTMHWIRQPPGKGLEWIGGINPNNGGTSYKPSLKSRVTISVDTSKNQFSLKLSSVTAADTAVYYCARGGSHYYAMDYWGQGTLVTVSS

SEQ ID NO: 1488 - protein, 116 aa, Artificial Sequence
  Description of Artificial Sequence: Synthetic polypeptide
  Synthetic Construct
QVQLQQSGPDLVKPGASVKISCKASGYSFTGYYMHWVKQSHGKSLEWIGRVNPNNGGTSYNQKFKGKAILTVDKSSSTAYMELRSLTSEDSAVYYCVLTGGYFDYWGQGTTLTVSS

SEQ ID NO: 1489 - protein, 116 aa, Artificial Sequence
  Description of Artificial Sequence: Synthetic polypeptide
  Synthetic Construct
QVQLVQSGAEVKKPGASVKVSCKASGYSFTGYYMHWVRQAPGQGLEWIGRVNPNNGGTSYNQKFQGRVTMTRDTSTSTVYMELSSLRSEDTAVYYCVLTGGYFDYWGQGTLVTVSS

SEQ ID NO: 1490 - protein, 116 aa, Artificial Sequence
  Description of Artificial Sequence: Synthetic polypeptide
  Synthetic Construct
EVQLVQSGAEVKKPGESLKISCKGSGYSFTGYYMHWVRQMPGKGLEWIGRVNPNNGGTSYNPSFQGQVTISADKSISTAYLQWSSLKASDTAMYYCVLTGGYFDYWGQGTLVTVSS

SEQ ID NO: 1491 - protein, 116 aa, Artificial Sequence
  Description of Artificial Sequence: Synthetic polypeptide
  Synthetic Construct
EVQLLESGGGLVQPGGSLRLSCAASGYSFTGYYMHWVRQAPGKGLEWIGRVNPNNGGTSYNDSVKGRFTISRDNSKNTLYLQMNSLRAEDTAVYYCVLTGGYFDYWGQGTLVTVSS

SEQ ID NO: 1492 - protein, 116 aa, Artificial Sequence
  Description of Artificial Sequence: Synthetic polypeptide
  Synthetic Construct
QVQLVQSGAEVKKPGSSVKVSCKASGYSFTGYYMHWVRQAPGQGLEWIGRVNPNNGGTSYNQKFQGRVTITADESTSTAYMELSSLRSEDTAVYYCVLTGGYFDYWGQGTLVTVSS

SEQ ID NO: 1493 - protein, 116 aa, Artificial Sequence
  Description of Artificial Sequence: Synthetic polypeptide
  Synthetic Construct
QVQLVESGGGVVQPGRSLRLSCAASGYSFTGYYMHWVRQAPGKGLEWIGRVNPNNGGTSYNDSVKGRFTISRDNSKNTLYLQMNSLRAEDTAVYYCVLTGGYFDYWGQGTLVTVSS

SEQ ID NO: 1494 - protein, 116 aa, Artificial Sequence
  Description of Artificial Sequence: Synthetic polypeptide
  Synthetic Construct
EVQLVESGGGLVQPGGSLRLSCAASGYSFTGYYMHWVRQAPGKGLEWIGRVNPNNGGTSYNDSVKGRFTISRDNAKNSLYLQMNSLRAEDTAVYYCVLTGGYFDYWGQGTLVTVSS

SEQ ID NO: 1495 - protein, 116 aa, Artificial Sequence; identical to SEQ ID NO: 1494
  Description of Artificial Sequence: Synthetic polypeptide
  Synthetic Construct

SEQ ID NO: 1496 - protein, 116 aa, Artificial Sequence
  Description of Artificial Sequence: Synthetic polypeptide
  Synthetic Construct
QVQLQESGPGLVKPSETLSLTCTVSGYSFTGYYMHWIRQPPGKGLEWIGRVNPNNGGTSYNPSLKSRVTISVDTSKNQFSLKLSSVTAADTAVYYCVLTGGYFDYWGQGTLVTVSS

SEQ ID NO: 1497 - protein, 116 aa, Artificial Sequence
  Description of Artificial Sequence: Synthetic polypeptide
  Synthetic Construct
EVQLVESGGGLVKPGGSLRLSCAASGYSFTGYYMHWVRQAPGKGLEWIGRVNPNNGGTSYNAPVKGRFTISRDDSKNTLYLQMNSLKTEDTAVYYCVLTGGYFDYWGQGTLVTVSS

SEQ ID NO: 1498 - protein, 116 aa, Artificial Sequence
  Description of Artificial Sequence: Synthetic polypeptide
  Synthetic Construct
QLQLQESGPGLVKPSETLSLTCTVSGYSFTGYYMHWIRQPPGKGLEWIGRVNPNNGGTSYNPSLKSRVTISVDTSKNQFSLKLSSVTAADTAVYYCVLTGGYFDYWGQGTLVTVSS

SEQ ID NO: 1499 - protein, 109 aa, Artificial Sequence
  Description of Artificial Sequence: Synthetic polypeptide
  Synthetic Construct
QTQSPSSLAVSAGEKVTLSCKSSQSVFYSSNQKNYLAWYQQKPGQSPKLLISWASTRESGVPDRFTGSGFGTDFTLTISSVQGEDLAVYYCHQYLSSLTFGAGTKLELK

SEQ ID NO: 1500 - protein, 112 aa, Artificial Sequence; identical to SEQ ID NO: 1423
  Description of Artificial Sequence: Synthetic polypeptide
  Synthetic Construct

SEQ ID NO: 1501 - protein, 112 aa, Artificial Sequence; identical to SEQ ID NO: 1425
  Description of Artificial Sequence: Synthetic polypeptide
  Synthetic Construct

SEQ ID NO: 1502 - protein, 112 aa, Artificial Sequence; identical to SEQ ID NO: 1424
  Description of Artificial Sequence: Synthetic polypeptide
  Synthetic Construct

SEQ ID NO: 1503 - protein, 112 aa, Artificial Sequence; identical to SEQ ID NO: 1426
  Description of Artificial Sequence: Synthetic polypeptide
  Synthetic Construct

SEQ ID NO: 1504 - protein, 112 aa, Artificial Sequence; identical to SEQ ID NO: 1428
  Description of Artificial Sequence: Synthetic polypeptide
  Synthetic Construct

SEQ ID NO: 1505 - protein, 112 aa, Artificial Sequence; identical to SEQ ID NO: 1427
  Description of Artificial Sequence: Synthetic polypeptide
  Synthetic Construct

SEQ ID NO: 1506 - protein, 112 aa, Artificial Sequence; identical to SEQ ID NO: 1431
  Description of Artificial Sequence: Synthetic polypeptide
  Synthetic Construct

SEQ ID NO: 1507 - protein, 112 aa, Artificial Sequence; identical to SEQ ID NO: 1429
  Description of Artificial Sequence: Synthetic polypeptide
  Synthetic Construct

SEQ ID NO: 1508 - protein, 112 aa, Artificial Sequence; identical to SEQ ID NO: 1430
  Description of Artificial Sequence: Synthetic polypeptide
  Synthetic Construct

SEQ ID NO: 1509 - protein, 112 aa, Artificial Sequence; identical to SEQ ID NO: 1432
  Description of Artificial Sequence: Synthetic polypeptide
  Synthetic Construct

SEQ ID NO: 1510 - protein, 9 aa, Artificial Sequence
  Description of Artificial Sequence: Synthetic peptide
  Synthetic Construct
SQDVSTTVA

SEQ ID NO: 1511 - protein, 14 aa, Artificial Sequence
  Description of Artificial Sequence: Synthetic peptide
  Synthetic Construct
SQSIVHSNGNTYLE

SEQ ID NO: 1512 - protein, 9 aa, Artificial Sequence
  Description of Artificial Sequence: Synthetic peptide
  Synthetic Construct
SQGVSTAVA

SEQ ID NO: 1513 - protein, 9 aa, Artificial Sequence
  Description of Artificial Sequence: Synthetic peptide
  Synthetic Construct
SQDVRTAVA

SEQ ID NO: 1514 - protein, 9 aa, Artificial Sequence
  Description of Artificial Sequence: Synthetic peptide
  Synthetic Construct
SENVVTYVS

SEQ ID NO: 1515 - protein, 7 aa, Artificial Sequence
  Description of Artificial Sequence: Synthetic peptide
  Synthetic Construct
SASYRYT

SEQ ID NO: 1516 - protein, 7 aa, Artificial Sequence
  Description of Artificial Sequence: Synthetic peptide
  Synthetic Construct
WASTRHT

SEQ ID NO: 1517 - protein, 7 aa, Artificial Sequence
  Description of Artificial Sequence: Synthetic peptide
  Synthetic Construct
GASNRYT

SEQ ID NO: 1518 - protein, 9 aa, Artificial Sequence
  Description of Artificial Sequence: Synthetic peptide
  Synthetic Construct
QQHYSTPPT

SEQ ID NO: 1519 - protein, 9 aa, Artificial Sequence
  Description of Artificial Sequence: Synthetic peptide
  Synthetic Construct
FQGSHVPFT

SEQ ID NO: 1520 - protein, 8 aa, Artificial Sequence
  Description of Artificial Sequence: Synthetic peptide
  Synthetic Construct
HQHYSTYT

SEQ ID NO: 1521 - protein, 10 aa, Artificial Sequence
  Description of Artificial Sequence: Synthetic peptide
  Synthetic Construct
QQHYGTPPWT

SEQ ID NO: 1522 - protein, 9 aa, Artificial Sequence
  Description of Artificial Sequence: Synthetic peptide
  Synthetic Construct
GQGYSYPYT

SEQ ID NO: 1523 - protein, 11 aa, Artificial Sequence
  Description of Artificial Sequence: Synthetic peptide
  Synthetic Construct
SRFTFSSYAMS

SEQ ID NO: 1524 - protein, 11 aa, Artificial Sequence
  Description of Artificial Sequence: Synthetic peptide
  Synthetic Construct
SAFSLTNYAVH

SEQ ID NO: 1525 - protein, 11 aa, Artificial Sequence
  Description of Artificial Sequence: Synthetic peptide
  Synthetic Construct
SRFTFSSYAVS

SEQ ID NO: 1526 - protein, 14 aa, Artificial Sequence
  Description of Artificial Sequence: Synthetic peptide
  Synthetic Construct
VAAISGGGRYTYYP

SEQ ID NO: 1527 - protein, 13 aa, Artificial Sequence
  Description of Artificial Sequence: Synthetic peptide
  Synthetic Construct
LGVIWSGGSTAFN

SEQ ID NO: 1528 - protein, 14 aa, Artificial Sequence
  Description of Artificial Sequence: Synthetic peptide
  Synthetic Construct
VATISGGGRYTYYP

SEQ ID NO: 1529 - protein, 10 aa, Artificial Sequence
  Description of Artificial Sequence: Synthetic peptide
  Synthetic Construct
ARHYDGYLDY

SEQ ID NO: 1530 - protein, 13 aa, Artificial Sequence
  Description of Artificial Sequence: Synthetic peptide
  Synthetic Construct
ATHYYRSTYAFSY

SEQ ID NO: 1531 - protein, 25 aa, Artificial Sequence
  Description of Artificial Sequence: Synthetic peptide
  Synthetic Construct
DIVMTQSHKFMSTSVGDRVSITCKA

SEQ ID NO: 1532 - protein, 25 aa, Artificial Sequence
  Description of Artificial Sequence: Synthetic peptide
  Synthetic Construct
DVLMTQTPLSLPVSLGDQASISCRS

SEQ ID NO: 1533 - protein, 25 aa, Artificial Sequence
  Description of Artificial Sequence: Synthetic peptide
  Synthetic Construct
DIVMTQSHKFMSTSIGARVSITCKA

SEQ ID NO: 1534 - protein, 25 aa, Artificial Sequence
  Description of Artificial Sequence: Synthetic peptide
  Synthetic Construct
DIVMTQSPKSMSMSVGERVTLTCKA

SEQ ID NO: 1535 - protein, 32 aa, Artificial Sequence
  Description of Artificial Sequence: Synthetic polypeptide
  Synthetic Construct
GVPDRFTGSGFGTDFTFTISSVQAEDLAVYYC

SEQ ID NO: 1536 - protein, 32 aa, Artificial Sequence
  Description of Artificial Sequence: Synthetic polypeptide
  Synthetic Construct
GVPDRFTGSGSGTDYTLTISSVQAEDLALYYC

SEQ ID NO: 1537 - protein, 32 aa, Artificial Sequence
  Description of Artificial Sequence: Synthetic polypeptide
  Synthetic Construct
GVPDRFTGSGSATDFTLTISSVQAEDLADYHC

SEQ ID NO: 1538 - protein, 32 aa, Artificial Sequence
  Description of Artificial Sequence: Synthetic polypeptide
  Synthetic Construct
GVPDRFTGSGSGTDFTFTISSVQAEDLAVYYC

SEQ ID NO: 1539 - protein, 24 aa, Artificial Sequence
  Description of Artificial Sequence: Synthetic peptide
  Synthetic Construct
EVQLVESGGGLVKPGGSLKLSCEA

SEQ ID NO: 1540 - protein, 24 aa, Artificial Sequence
  Description of Artificial Sequence: Synthetic peptide
  Synthetic Construct
QVQLQESGPGLVQPSQSLSIICTV

SEQ ID NO: 1541 - protein, 12 aa, Artificial Sequence
  Description of Artificial Sequence: Synthetic peptide
  Synthetic Construct
WIRQSPGKGLEW

SEQ ID NO: 1542 - protein, 35 aa, Artificial Sequence
  Description of Artificial Sequence: Synthetic polypeptide
  Synthetic Construct
DSMKGRFTISRDNAKNFLYLQMSSLRSEDTAMYYC

SEQ ID NO: 1543 - protein, 35 aa, Artificial Sequence
  Description of Artificial Sequence: Synthetic polypeptide
  Synthetic Construct
AAFISRLNISKDNSKSQVFFKMNSLQSDDTAIYYC

SEQ ID NO: 1544 - protein, 107 aa, Artificial Sequence
  Description of Artificial Sequence: Synthetic polypeptide
  Synthetic Construct
DIVMTQSHKFMSTSVGDRVSITCKASQDVSTTVAWYQQKPGQSPKLLIYSASYRYTGVPDRFTGSGFGTDFTFTISSVQAEDLAVYYCQQHYSTPPTFGGGTKLEIK

SEQ ID NO: 1545 - protein, 112 aa, Artificial Sequence
  Description of Artificial Sequence: Synthetic polypeptide
  Synthetic Construct
DVLMTQTPLSLPVSLGDQASISCRSSQSIVHSNGNTYLEWYLQKPGQSPKLLIYKVSNRFSGVPDRFSGSGSGTDFTLKISRVEAEDLGVYYCFQGSHVPFTFGSGTKLEIK

SEQ ID NO: 1546 - protein, 106 aa, Artificial Sequence
  Description of Artificial Sequence: Synthetic polypeptide
  Synthetic Construct
DIVMTQSHKFMSTSVGDRVSITCKASQGVSTAVAWYQQKPGQSPKLLIYWASTRHTGVPDRFTGSGSGTDYTLTISSVQAEDLALYYCHQHYSTYTFGGGTKLEIK

SEQ ID NO: 1547 - protein, 108 aa, Artificial Sequence
  Description of Artificial Sequence: Synthetic polypeptide
  Synthetic Construct
DIVMTQSHKFMSTSIGARVSITCKASQDVRTAVAWYQQKPGQSPKLLIYSASYRYTGVPDRFTGSGFGTDFTFTISSVQAEDLAVYYCQQHYGTPPWTFGGGTKLEIK

SEQ ID NO: 1548 - protein, 107 aa, Artificial Sequence
  Description of Artificial Sequence: Synthetic polypeptide
  Synthetic Construct
DIVMTQSPKSMSMSVGERVTLTCKASENVVTYVSWYQQKPEQSPKLLIYGASNRYTGVPDRFTGSGSATDFTLTISSVQAEDLADYHCGQGYSYPYTFGGGTKLEIK

SEQ ID NO: 1549 - protein, 108 aa, Artificial Sequence
  Description of Artificial Sequence: Synthetic polypeptide
  Synthetic Construct
DIVMTQSHKFMSTSIGARVSITCKASQDVRTAVAWYQQKPGQSPKLLIYSASYRYTGVPDRFTGSGSGTDFTFTISSVQAEDLAVYYCQQHYGTPPWTFGGGTKLEIK

SEQ ID NO: 1550 - protein, 107 aa, Artificial Sequence
  Description of Artificial Sequence: Synthetic polypeptide
  Synthetic Construct
DIVMTQSHKFMSTSVGDRVSITCKASQDVSTTVAWYQQKPGQSPKLLIYSASYRYTGVPDRFTGSGSGTDFTFTISSVQAEDLAVYYCQQHYSTPPTFGGGTKLEIK

SEQ ID NO: 1551 - protein, 117 aa, Artificial Sequence
  Description of Artificial Sequence: Synthetic polypeptide
  Synthetic Construct
EVQLVESGGGLVKPGGSLKLSCEASRFTFSSYAMSWVRQTPEKRLEWVAAISGGGRYTYYPDSMKGRFTISRDNAKNFLYLQMSSLRSEDTAMYYCARHYDGYLDYWGQGTTLTVSS

SEQ ID NO: 1552 - protein, 119 aa, Artificial Sequence
  Description of Artificial Sequence: Synthetic polypeptide
  Synthetic Construct
QVQLQESGPGLVQPSQSLSIICTVSAFSLTNYAVHWIRQSPGKGLEWLGVIWSGGSTAFNAAFISRLNISKDNSKSQVFFKMNSLQSDDTAIYYCATHYYRSTYAFSYWGQGTLVTVSA

SEQ ID NO: 1553 - protein, 117 aa, Artificial Sequence
  Description of Artificial Sequence: Synthetic polypeptide
  Synthetic Construct
EVQLVESGGGLVKPGGSLKLSCEASRFTFSSYAVSWVRQTPEKRLEWVATISGGGRYTYYPDSMKGRFTISRDNAKNFLYLQMSSLRSEDTAMYYCARHYDGYLDYWGQGTTLTVSS

SEQ ID NO: 1554 - protein, 14 aa, Artificial Sequence
  Description of Artificial Sequence: Synthetic peptide
  Synthetic Construct
SQSLVHSNGNTYLH

SEQ ID NO: 1555 - protein, 14 aa, Artificial Sequence
  Description of Artificial Sequence: Synthetic peptide
  Synthetic Construct
SQSLVHSNGDTYLH

SEQ ID NO: 1556 - protein, 13 aa, Artificial Sequence
  Description of Artificial Sequence: Synthetic peptide
  Synthetic Construct
SESVDYHGTSLMQ

SEQ ID NO: 1557 - protein, 9 aa, Artificial Sequence
  Description of Artificial Sequence: Synthetic peptide
  Synthetic Construct
  MOD_RES (5)..(5): Glutamic acid or Glutamine
SENIXYSLA

SEQ ID NO: 1558 - protein, 11 aa, Artificial Sequence
  Description of Artificial Sequence: Synthetic peptide
  Synthetic Construct
RASQSIGTSIH

SEQ ID NO: 1559 - protein, 7 aa, Artificial Sequence
  Description of Artificial Sequence: Synthetic peptide
  Synthetic Construct
KVSNRVS

SEQ ID NO: 1560 - protein, 7 aa, Artificial Sequence
  Description of Artificial Sequence: Synthetic peptide
  Synthetic Construct
KVSDRFS

SEQ ID NO: 1561 - protein, 7 aa, Artificial Sequence
  Description of Artificial Sequence: Synthetic peptide
  Synthetic Construct
AASNVES

SEQ ID NO: 1562 - protein, 7 aa, Artificial Sequence
  Description of Artificial Sequence: Synthetic peptide
  Synthetic Construct
NANSLED

SEQ ID NO: 1563 - protein, 7 aa, Artificial Sequence
  Description of Artificial Sequence: Synthetic peptide
  Synthetic Construct
FASESIS

SEQ ID NO: 1564 - protein, 9 aa, Artificial Sequence
  Description of Artificial Sequence: Synthetic peptide
  Synthetic Construct
QQNRKILWT

SEQ ID NO: 1565 - protein, 9 aa, Artificial Sequence
  Description of Artificial Sequence: Synthetic peptide
  Synthetic Construct
KQAYDVPWT

SEQ ID NO: 1566 - protein, 9 aa, Artificial Sequence
  Description of Artificial Sequence: Synthetic peptide
  Synthetic Construct
QQTNTWPIT

SEQ ID NO: 1567 - protein, 11 aa, Artificial Sequence
  Description of Artificial Sequence: Synthetic peptide
  Synthetic Construct
SGYTFTDFYMN

SEQ ID NO: 1568 - protein, 11 aa, Artificial Sequence
  Description of Artificial Sequence: Synthetic peptide
  Synthetic Construct
SGYTFTAYWMH

SEQ ID NO: 1569 - protein, 11 aa, Artificial Sequence
  Description of Artificial Sequence: Synthetic peptide
  Synthetic Construct
SGFNIKNTYIH

SEQ ID NO: 1570 - protein, 11 aa, Artificial Sequence
  Description of Artificial Sequence: Synthetic peptide
  Synthetic Construct
SGYTFTNYWIH

SEQ ID NO: 1571 - protein, 11 aa, Artificial Sequence
  Description of Artificial Sequence: Synthetic peptide
  Synthetic Construct
SGYTFTSATMH

SEQ ID NO: 1572 - protein, 9 aa, Artificial Sequence
  Description of Artificial Sequence: Synthetic peptide
  Synthetic Construct
YSFTDYNIH

SEQ ID NO: 1573 - protein, 9 aa, Artificial Sequence
  Description of Artificial Sequence: Synthetic peptide
  Synthetic Construct
FTLSNYWMN

SEQ ID NO: 1574 - protein, 9 aa, Artificial Sequence
  Description of Artificial Sequence: Synthetic peptide
  Synthetic Construct
YTFTDYNIH

SEQ ID NO: 1575 - protein, 14 aa, Artificial Sequence
  Description of Artificial Sequence: Synthetic peptide
  Synthetic Construct
IGDINPNNGHTTYN

SEQ ID NO: 1576 - protein, 14 aa, Artificial Sequence
  Description of Artificial Sequence: Synthetic peptide
  Synthetic Construct
IGRTHPSDSDTNYN

SEQ ID NO: 1577 - protein, 14 aa, Artificial Sequence
  Description of Artificial Sequence: Synthetic peptide
  Synthetic Construct
IGRIDPAIGNTNYA

SEQ ID NO: 1578 - protein, 14 aa, Artificial Sequence
  Description of Artificial Sequence: Synthetic peptide
  Synthetic Construct
IGRIHPSDSDINYN

SEQ ID NO: 1579 - protein, 14 aa, Artificial Sequence
  Description of Artificial Sequence: Synthetic peptide
  Synthetic Construct
IGYINPNSGYSKYN

SEQ ID NO: 1580 - protein, 14 aa, Artificial Sequence
  Description of Artificial Sequence: Synthetic peptide
  Synthetic Construct
IGYINPNSDNTRYI

SEQ ID NO: 1581 - protein, 16 aa, Artificial Sequence
  Description of Artificial Sequence: Synthetic peptide
  Synthetic Construct
VAQIRLKSDNYATHYA

SEQ ID NO: 1582 - protein, 14 aa, Artificial Sequence
  Description of Artificial Sequence: Synthetic peptide
  Synthetic Construct
IGYINPNNGGTTYN

SEQ ID NO: 1583 - protein, 16 aa, Artificial Sequence
  Description of Artificial Sequence: Synthetic peptide
  Synthetic Construct
AREPYSYGSSPWYFLV

SEQ ID NO: 1584 - protein, 13 aa, Artificial Sequence
  Description of Artificial Sequence: Synthetic peptide
  Synthetic Construct
ATYSNYVTGAMDS

SEQ ID NO: 1585 - protein, 7 aa, Artificial Sequence
  Description of Artificial Sequence: Synthetic peptide
  Synthetic Construct
VSPGMDY

SEQ ID NO: 1586 - protein, 9 aa, Artificial Sequence
  Description of Artificial Sequence: Synthetic peptide
  Synthetic Construct
VKTGTSFAS

SEQ ID NO: 1587 - protein, 16 aa, Artificial Sequence
  Description of Artificial Sequence: Synthetic peptide
  Synthetic Construct
ARWGIDGNYGGGFFDV

SEQ ID NO: 1588 - protein, 12 aa, Artificial Sequence
  Description of Artificial Sequence: Synthetic peptide
  Synthetic Construct
TRGFSNLGAMDY

SEQ ID NO: 1589 - protein, 10 aa, Artificial Sequence
  Description of Artificial Sequence: Synthetic peptide
  Synthetic Construct
TGAGGNHENY

SEQ ID NO: 1590 - protein, 9 aa, Artificial Sequence
  Description of Artificial Sequence: Synthetic peptide
  Synthetic Construct
ATTYVSFSY

SEQ ID NO: 1591 - protein, 25 aa, Artificial Sequence
  Description of Artificial Sequence: Synthetic peptide
  Synthetic Construct
  MOD_RES (1)..(1): Glutamic acid or Glutamine
  MOD_RES (4)..(4): Glutamic acid or Glutamine
XVVXTQTPLSLPVSLGDQASFSCRS

SEQ ID NO: 1592 - protein, 25 aa, Artificial Sequence
  Description of Artificial Sequence: Synthetic peptide
  Synthetic Construct
NIVMTQSPKSMSMSVGERVTLTCKA

SEQ ID NO: 1593 - protein, 25 aa, Artificial Sequence
  Description of Artificial Sequence: Synthetic peptide
  Synthetic Construct
DVVMTQTPLSLPVSLGDQASISCRS

SEQ ID NO: 1594 - protein, 25 aa, Artificial Sequence
  Description of Artificial Sequence: Synthetic peptide
  Synthetic Construct
DIVLTQSPASLAVSLGQRATISCRA

SEQ ID NO: 1595 - protein, 25 aa, Artificial Sequence
  Description of Artificial Sequence: Synthetic peptide
  Synthetic Construct
  MOD_RES (14)..(14): Glutamic acid or Glutamine
DIQMTQFPASLAAXVGESVTITCRA

SEQ ID NO: 1596 - protein, 22 aa, Artificial Sequence
  Description of Artificial Sequence: Synthetic peptide
  Synthetic Construct
ILLTQSPAILSVSPGERVSFSC

SEQ ID NO: 1597 - protein, 15 aa, Artificial Sequence
  Description of Artificial Sequence: Synthetic peptide
  Synthetic Construct
WFLQKPGQSPKLLIF

SEQ ID NO: 1598 - protein, 15 aa, Artificial Sequence
  Description of Artificial Sequence: Synthetic peptide
  Synthetic Construct
WYQQKPGQPPKLLIY

SEQ ID NO: 1599 - protein, 15 aa, Artificial Sequence
  Description of Artificial Sequence: Synthetic peptide
  Synthetic Construct
WYQQKQGKSPQLLIY

SEQ ID NO: 1600 - protein, 15 aa, Artificial Sequence
  Description of Artificial Sequence: Synthetic peptide
  Synthetic Construct
WYQQRTNGSPRLLIK

SEQ ID NO: 1601 - protein, 32 aa, Artificial Sequence
  Description of Artificial Sequence: Synthetic polypeptide
  Synthetic Construct
GVPDRFSGSGSGTDFTLRISRVEAEDLGVYFC

SEQ ID NO: 1602 - protein, 32 aa, Artificial Sequence
  Description of Artificial Sequence: Synthetic polypeptide
  Synthetic Construct
GVPARFSGSGSGTDFSLNIHPVEEDDIAMYFC

SEQ ID NO: 1603 - protein, 32 aa, Artificial Sequence
  Description of Artificial Sequence: Synthetic polypeptide
  Synthetic Construct
GVPSRFSGSGSGTQYSMKINSMQPEDTAIYFC

SEQ ID NO: 1604 - protein, 32 aa, Artificial Sequence
  Description of Artificial Sequence: Synthetic polypeptide
  Synthetic Construct
GIPSRFSGSGSGTDFTLNINSVESEDIADYYC

SEQ ID NO: 1605 - protein, 24 aa, Artificial Sequence
  Description of Artificial Sequence: Synthetic peptide
  Synthetic Construct
  MOD_RES (4)..(4): Glutamic acid or Glutamine
EVQXQQSGPELVKPGASVKISCKA

SEQ ID NO: 1606 - protein, 24 aa, Artificial Sequence
  Description of Artificial Sequence: Synthetic peptide
  Synthetic Construct
QVQLQQPGAELVKPGASVKVSCKA

SEQ ID NO: 1607 - protein, 24 aa, Artificial Sequence
  Description of Artificial Sequence: Synthetic peptide
  Synthetic Construct
QVQLQQSVAELVRPGASVKLSCTA

SEQ ID NO: 1608 - protein, 24 aa, Artificial Sequence
  Description of Artificial Sequence: Synthetic peptide
  Synthetic Construct
QVQLQQSGAELVKPGASVKVSCKA

SEQ ID NO: 1609 - protein, 24 aa, Artificial Sequence
  Description of Artificial Sequence: Synthetic peptide
  Synthetic Construct
  MOD_RES (1)..(2): Any Amino Acid
  MOD_RES (3)..(5): Any naturally occurring amino acid
XXXXXQSGTELARPGASVKMPCKA

SEQ ID NO: 1610 - protein, 26 aa, Artificial Sequence
  Description of Artificial Sequence: Synthetic peptide
  Synthetic Construct
QVQLQQSGRELVKPGASVKMSCMSSG

SEQ ID NO: 1611 - protein, 26 aa, Artificial Sequence
  Description of Artificial Sequence: Synthetic peptide
  Synthetic Construct
QVKLEESGGGLVQPGGSMKLSCVASG

SEQ ID NO: 1612 - protein, 26 aa, Artificial Sequence
  Description of Artificial Sequence: Synthetic peptide
  Synthetic Construct
QVQLQQSGPELVKPGASVQMSCEASG

SEQ ID NO: 1613 - protein, 12 aa, Artificial Sequence
  Description of Artificial Sequence: Synthetic peptide
  Synthetic Construct
WVKQSLGKSLEW

SEQ ID NO: 1614 - protein, 12 aa, Artificial Sequence
  Description of Artificial Sequence: Synthetic peptide
  Synthetic Construct
WVKEKPGQGLEW

SEQ ID NO: 1615 - protein, 12 aa, Artificial Sequence
  Description of Artificial Sequence: Synthetic peptide
  Synthetic Construct
WVKQRPEQGLEW

SEQ ID NO: 1616 - protein, 12 aa, Artificial Sequence
  Description of Artificial Sequence: Synthetic peptide
  Synthetic Construct
WVKQRPGQGLEW

SEQ ID NO: 1617 - protein, 12 aa, Artificial Sequence
  Description of Artificial Sequence: Synthetic peptide
  Synthetic Construct
WVIQSHGESLEW

SEQ ID NO: 1618 - protein, 35 aa, Artificial Sequence
  Description of Artificial Sequence: Synthetic polypeptide
  Synthetic Construct
  MOD_RES (27)..(27): Glutamic acid or Glutamine
QKFKGKATLTVDKSSSTAYMELRSLTXEESAVYYC

SEQ ID NO: 1619 - protein, 35 aa, Artificial Sequence
  Description of Artificial Sequence: Synthetic polypeptide
  Synthetic Construct
HNFKGKATLTVDKSSSTAYMQLNSLTSEDSAVYYC

SEQ ID NO: 1620 - protein, 35 aa, Artificial Sequence
  Description of Artificial Sequence: Synthetic polypeptide
  Synthetic Construct
PKFQATATITVATSSNSAYLQLSSLASEDTAIYYC

SEQ ID NO: 1621 - protein, 36 aa, Artificial Sequence
  Description of Artificial Sequence: Synthetic polypeptide
  Synthetic Construct
QKFKGKATLTVDKSSSTAYMQILSSLTSEDSAVYYC

SEQ ID NO: 1622 - protein, 35 aa, Artificial Sequence
  Description of Artificial Sequence: Synthetic polypeptide
  Synthetic Construct
QKFKDKATLTADKSSSTAYMQLSSLTSEESAVYYC

SEQ ID NO: 1623 - protein, 35 aa, Artificial Sequence
  Description of Artificial Sequence: Synthetic polypeptide
  Synthetic Construct
QKFKGKATLTVNKSSSTAYMELRSLTSEDSAVYYC

SEQ ID NO: 1624 - protein, 35 aa, Artificial Sequence
  Description of Artificial Sequence: Synthetic polypeptide
  Synthetic Construct
ESVKGRFTISRDDSKSSVYLQMNNLRAVDTGIYYC

SEQ ID NO: 1625 - protein, 35 aa, Artificial Sequence
  Description of Artificial Sequence: Synthetic polypeptide
  Synthetic Construct
QKFKGKATLTVNKSSSTAYIELRSLTSEDSAVYHC

SEQ ID NO: 1626 - protein, 9 aa, Artificial Sequence
  Description of Artificial Sequence: Synthetic peptide
  Synthetic Construct
RGTGTTVTV

SEQ ID NO: 1627 - protein, 11 aa, Artificial Sequence
  Description of Artificial Sequence: Synthetic peptide
  Synthetic Construct
WGHGTSVTVSS

SEQ ID NO: 1628 - protein, 10 aa, Artificial Sequence
  Description of Artificial Sequence: Synthetic peptide
  Synthetic Construct
WSQGTLVTVS

SEQ ID NO: 1629 - protein, 112 aa, Artificial Sequence
  Description of Artificial Sequence: Synthetic polypeptide
  Synthetic Construct
  MOD_RES (1)..(1): Glutamic acid or Glutamine
  MOD_RES (4)..(4): Glutamic acid or Glutamine
XVVXTQTPLSLPVSLGDQASFSCRSSQSLVHSNGNTYLHWFLQKPGQSPKLLIFKVSNRVSGVPDRFSGSGSGTDFTLKISRVEAEDLGVYFCSQSTHVPLTFGAGTKLELK

SEQ ID NO: 1630 - protein, 107 aa, Artificial Sequence
  Description of Artificial Sequence: Synthetic polypeptide
  Synthetic Construct
NIVMTQSPKSMSMSVGERVTLTCKASENVVTYVSWYQQKPEQSPKLLIYGASNRYTGVPDRFTGSGSATDFTLTISSVQAEDLADYHCGQGYSYPYTFGGGTKLEIK

SEQ ID NO: 1631 - protein, 112 aa, Artificial Sequence
  Description of Artificial Sequence: Synthetic polypeptide
  Synthetic Construct
DVVMTQTPLSLPVSLGDQASISCRSSQSLVHSNGNTYLHWYLQKPGQSPKLLIYKVSDRFSGVPDRFSGSGSGTDFTLRISRVEAEDLGVYFCSQSTHVPLTFGAGTKLELK

SEQ ID NO: 1632 - protein, 112 aa, Artificial Sequence
  Description of Artificial Sequence: Synthetic polypeptide
  Synthetic Construct
DVVMTQTPLSLPVSLGDQASISCRSSQSLVHSNGDTYLHWYLQKPGQSPKLLIYKVSNRFSGVPDRFSGSGSGTDFTLKISRVEAEDLGVYFCSQSTHVPLTFGAGTKLELK

SEQ ID NO: 1633 - protein, 111 aa, Artificial Sequence
  Description of Artificial Sequence: Synthetic polypeptide
  Synthetic Construct
DIVLTQSPASLAVSLGQRATISCRASESVDYHGTSLMQWYQQKPGQPPKLLIYAASNVESGVPARFSGSGSGTDFSLNIHPVEEDDIAMYFCQQNRKILWTFGGGTKLEIK

SEQ ID NO: 1634 - protein, 107 aa, Artificial Sequence
  Description of Artificial Sequence: Synthetic polypeptide
  Synthetic Construct
  MOD_RES (14)..(14): Glutamic acid or Glutamine
  MOD_RES (30)..(30): Glutamic acid or Glutamine
DIQMTQFPASLAAXVGESVTITCRASENIXYSLAWYQQKQGKSPQLLIYNANSLEDGVPSRFSGSGSGTQYSMKINSMQPEDTAIYFCKQAYDVPWTFGGGTKLEIK

SEQ ID NO: 1635 - protein, 106 aa, Artificial Sequence
  Description of Artificial Sequence: Synthetic polypeptide
  Synthetic Construct
ILLTQSPAILSVSPGERVSFSCRASQSIGTSIHWYQQRTNGSPRLLIKFASESISGIPSRFSGSGSGTDFTLNINSVESEDIADYYCQQTNTWPITFGAGTKLELK

SEQ ID NO: 1636 - protein, 112 aa, Artificial Sequence
  Description of Artificial Sequence: Synthetic polypeptide
  Synthetic Construct
DVVMTQTPLSLPVSLGDQASISCRSSQSLVHSNGNTYLHWYLQKPGQSPKLLIYKVSNRFSGVPDRFSGSGSGTDFTLKISRVEAEDLGVYFCSQSTHVPLTFGAGTKLELK

SEQ ID NO: 1637 - protein, 121 aa, Artificial Sequence
  Description of Artificial Sequence: Synthetic polypeptide
  Synthetic Construct
  MOD_RES (4)..(4): Glutamic acid or Glutamine
  MOD_RES (88)..(88): Glutamic acid or Glutamine
EVQXQQSGPELVKPGASVKISCKASGYTFTDFYMNWVKQSLGKSLEWIGDINPNNGHTTYNQKFKGKATLTVDKSSSTAYMELRSLTXEESAVYYCAREPYSYGSSPWYFLVRGTGTTVTV

SEQ ID NO: 1638 - protein, 120 aa, Artificial Sequence
  Description of Artificial Sequence: Synthetic polypeptide
  Synthetic Construct
QVQLQQPGAELVKPGASVKVSCKASGYTFTAYWMHWVKEKPGQGLEWIGRTHPSDSDTNYNHNFKGKATLTVDKSSSTAYMQLNSLTSEDSAVYYCATYSNYVTGAMDSWGQGTSVTVSS

SEQ ID NO: 1639 - protein, 114 aa, Artificial Sequence
  Description of Artificial Sequence: Synthetic polypeptide
  Synthetic Construct
QVQLQQSVAELVRPGASVKLSCTASGFNIKNTYIHWVKQRPEQGLEWIGRIDPAIGNTNYAPKFQATATITVATSSNSAYLQLSSLASEDTAIYYCVSPGMDYWGHGTSVTVSS

SEQ ID NO: 1640 - protein, 116 aa, Artificial Sequence
  Description of Artificial Sequence: Synthetic polypeptide
  Synthetic Construct
QVQLQQSGAELVKPGASVKVSCKASGYTFTNYWIHWVKQRPGQGLEWIGRIHPSDSDINYNQKFKGKATLTVDKSSSTAYMQILSSLTSEDSAVYYCVKTGTSFASWSQGTLVTVS

SEQ ID NO: 1641 - protein, 105 aa, Artificial Sequence
  Description of Artificial Sequence: Synthetic polypeptide
  Synthetic Construct
EIVLTQSPATLSLSPGERATLSCKASSNVNYMSWYQQKPGQAPRLLIYFTSNLPSGIPARFSGSGSGTDFTLTISSLEPEDFAVYYCSGEVTQFTFGQGTKVEIK

SEQ ID NO: 1642 - protein, 123 aa, Artificial Sequence
  Description of Artificial Sequence: Synthetic polypeptide
  Synthetic Construct
  MOD_RES (1)..(2): Any Amino Acid
  MOD_RES (3)..(5): Any naturally occurring amino acid
XXXXXQSGTELARPGASVKMPCKASGYTFTSATMHWVKQRPGQGLEWIGYINPNSGYSKYNQKFKDKATLTADKSSSTAYMQLSSLTSEESAVYYCARWGIDGNYGGGFFDVWGTGTTVTVSS

SEQ ID NO: 1643 - protein, 119 aa, Artificial Sequence
  Description of Artificial Sequence: Synthetic polypeptide
  Synthetic Construct
QVQLQQSGRELVKPGASVKMSCMSSGYSFTDYNIHWVIQSHGESLEWIGYINPNSDNTRYIQKFKGKATLTVNKSSSTAYMELRSLTSEDSAVYYCTRGFSNLGAMDYWGQGTSVTVSS

SEQ ID NO: 1644 - protein, 119 aa, Artificial Sequence
  Description of Artificial Sequence: Synthetic polypeptide
  Synthetic Construct
QVKLEESGGGLVQPGGSMKLSCVASGFTLSNYWMNWVRQSPEKGLEWVAQIRLKSDNYATHYAESVKGRFTISRDDSKSSVYLQMNNLRAVDTGIYYCTGAGGNHENYWGQGTTLTVSS

SEQ ID NO: 1645 - protein, 116 aa, Artificial Sequence
  Description of Artificial Sequence: Synthetic polypeptide
  Synthetic Construct
QVQLQQSGPELVKPGASVQMSCEASGYTFTDYNIHWVKQSHGKSLEWIGYINPNNGGTTYNQKFKGKATLTVNKSSSTAYIELRSLTSEDSAVYHCATTYVSFSYWGQGTLVTVSA

SEQ ID NO: 1646 - protein, 11 aa, Artificial Sequence
  Description of Artificial Sequence: Synthetic peptide
  Synthetic Construct
  MOD_RES (2)..(2): Any Amino Acid
  MOD_RES (6)..(6): Any Amino Acid
  MOD_RES (9)..(9): Any naturally occurring amino acid
RXSENXYSXLA

SEQ ID NO: 1647 - protein, 16 aa, Artificial Sequence
  Description of Artificial Sequence: Synthetic peptide
  Synthetic Construct
  MOD_RES (5)..(6): Any Amino Acid
  MOD_RES (7)..(7): Any naturally occurring amino acid
  MOD_RES (12)..(12): Any naturally occurring amino acid
  MOD_RES (16)..(16): Any naturally occurring amino acid
RSSQXXXHSNGXTYLX

SEQ ID NO: 1648 - protein, 17 aa, Artificial Sequence
  Description of Artificial Sequence: Synthetic peptide
  Synthetic Construct
  MOD_RES (6)..(7): Any Amino Acid
  MOD_RES (8)..(8): Any naturally occurring amino acid
  MOD_RES (10)..(11): Any naturally occurring amino acid
  MOD_RES (14)..(15): Any naturally occurring amino acid
  MOD_RES (17)..(17): Any naturally occurring amino acid
KSSQSXXXSXXQKXXLX

SEQ ID NO: 1649 - protein, 9 aa, Artificial Sequence
  Description of Artificial Sequence: Synthetic peptide
  Synthetic Construct
  MOD_RES (2)..(2): T or S
  MOD_RES (3)..(3): F or V
  MOD_RES (4)..(4): T or S
  MOD_RES (5)..(5): Any naturally occurring amino acid
  MOD_RES (7)..(8): Any Amino Acid
YXXXXYXXH

SEQ ID NO: 1650 - protein, 9 aa, Artificial Sequence
  Description of Artificial Sequence: Synthetic peptide
  Synthetic Construct
  MOD_RES (5)..(5): Any Amino Acid
  MOD_RES (7)..(7): Any Amino Acid
  MOD_RES (8)..(8): Any naturally occurring amino acid
YTFTXYXXH

SEQ ID NO: 1651 - protein, 9 aa, Artificial Sequence
  Description of Artificial Sequence: Synthetic peptide
  Synthetic Construct
  MOD_RES (9)..(9): D or G
FTFSDAWMX

SEQ ID NO: 1652 - protein, 9 aa, Artificial Sequence
  Description of Artificial Sequence: Synthetic peptide
  Synthetic Construct
  MOD_RES (2)..(2): Any Amino Acid
  MOD_RES (3)..(3): F or L
  MOD_RES (4)..(4): N or S
  MOD_RES (5)..(5): T or N
  MOD_RES (7)..(7): A, S, or W
  MOD_RES (9)..(9): N, K, or T
FXXXXYXMX

SEQ ID NO: 1653 - protein, 9 aa, Artificial Sequence
  Description of Artificial Sequence: Synthetic peptide
  Synthetic Construct
  MOD_RES (2)..(2): Any Amino Acid
FXFNTYAMN

SEQ ID NO: 1654 - protein, 9 aa, Artificial Sequence
  Description of Artificial Sequence: Synthetic peptide
  Synthetic Construct
  MOD_RES (2)..(2): Any Amino Acid
  MOD_RES (4)..(4): S or T
  MOD_RES (5)..(5): N, S, or T
  MOD_RES (6)..(6): Any Amino Acid
  MOD_RES (8)..(8): I or M
  MOD_RES (9)..(9): Any Amino Acid
YXFXXXWXX

SEQ ID NO: 1655 - protein, 9 aa, Artificial Sequence
  Description of Artificial Sequence: Synthetic peptide
  Synthetic Construct
  MOD_RES (2)..(2): Any Amino Acid
  MOD_RES (6)..(6): Any Amino Acid
  MOD_RES (9)..(9): Any naturally occurring amino acid
YXFSNXWIX

SEQ ID NO: 1656 - protein, 14 aa, Artificial Sequence
  Description of Artificial Sequence: Synthetic peptide
  Synthetic Construct
  MOD_RES (3)..(4): Any Amino Acid
  MOD_RES (5)..(5): Any naturally occurring amino acid
  MOD_RES (7)..(7): N or E
  MOD_RES (8)..(8): N, S, or T
  MOD_RES (9)..(9): G or D
  MOD_RES (10)..(10): G, D, or N
  MOD_RES (11)..(11): T, S, or N
  MOD_RES (12)..(12): Any Amino Acid
  MOD_RES (14)..(14): N, S, K, or I
IGXXXPXXXXXXYX

SEQ ID NO: 1657 - protein, 14 aa, Artificial Sequence
  Description of Artificial Sequence: Synthetic peptide
  Synthetic Construct
  MOD_RES (3)..(4): Any Amino Acid
  MOD_RES (5)..(5): Any naturally occurring amino acid
  MOD_RES (12)..(12): Any naturally occurring amino acid
IGXXXPNNGGTXYN

SEQ ID NO: 1658 - protein, 16 aa, Artificial Sequence
  Description of Artificial Sequence: Synthetic peptide
  Synthetic Construct
  MOD_RES (6)..(6): N or D
  MOD_RES (8)..(8): V or I
  MOD_RES (9)..(9): N or K
VAEIRXKXXNHATYYA

SEQ ID NO: 1659 - protein, 16 aa, Artificial Sequence
  Description of Artificial Sequence: Synthetic peptide
  Synthetic Construct
  MOD_RES (1)..(1): Any Amino Acid
  MOD_RES (2)..(2): A or G
  MOD_RES (3)..(3): Any Amino Acid
  MOD_RES (5)..(5): R or K
  MOD_RES (6)..(6): S, T, R, or L
  MOD_RES (7)..(7): K or N
  MOD_RES (8)..(8): S, E, or Q
  MOD_RES (9)..(9): N, S, or D
  MOD_RES (10)..(10): N or D
  MOD_RES (11)..(11): Y or F
  MOD_RES (14)..(14): Any Amino Acid
  MOD_RES (16)..(16): A or S
XXXIXXXXXXXATXYX

SEQ ID NO: 1660 - protein, 16 aa, Artificial Sequence
  Description of Artificial Sequence: Synthetic peptide
  Synthetic Construct
  MOD_RES (1)..(1): Any Amino Acid
  MOD_RES (3)..(3): Any Amino Acid
  MOD_RES (14)..(14): Any naturally occurring amino acid
XAXIRSKSNNYATXYA

SEQ ID NO: 1661 - protein, 14 aa, Artificial Sequence
  Description of Artificial Sequence: Synthetic peptide
  Synthetic Construct
  MOD_RES (3)..(3): Any Amino Acid
  MOD_RES (5)..(5): Y or D
  MOD_RES (7)..(7): G or N
  MOD_RES (8)..(8): Any Amino Acid
  MOD_RES (9)..(9): G or D
  MOD_RES (10)..(10): N or D
  MOD_RES (11)..(11): T, R, or S
  MOD_RES (12)..(12): N or K
  MOD_RES (13)..(13): Y or F
IGXIXPXXXXXXXN

SEQ ID NO: 1662 - protein, 14 aa, Artificial Sequence
  Description of Artificial Sequence: Synthetic peptide
  Synthetic Construct
  MOD_RES (3)..(3): Any Amino Acid
  MOD_RES (8)..(8): Any Amino Acid
IGXIYPGXGDTNYN

SEQ ID NO: 1663 - protein, 112 aa, Artificial Sequence
  Description of Artificial Sequence: Synthetic polypeptide
  Synthetic Construct
DIVMTQTPLSLSVTPGQPASISCRSSQSLVHSNGYTYLHWYLQKPGQSPQLLIYKVSNRFSGVPDRFSGSGSGTDFTLKISRVEAEDVGVYYCSQSTRVPYTFGQGTKLEIK

SEQ ID NO: 1664 - protein, 112 aa, Artificial Sequence
  Description of Artificial Sequence: Synthetic polypeptide
  Synthetic Construct
DVVMTQTPLSLSVTPGQPASISCRSSQSLVHSNGYTYLHWYLQKPGQSPQLLIYKVSNRFSGVPDRFSGSGSGTDFTLKISRVEAEDVGVYYCSQSTRVPYTFGQGTKLEIK

SEQ ID NO: 1665 - protein, 123 aa, Artificial Sequence
  Description of Artificial Sequence: Synthetic polypeptide
  Synthetic Construct
QVQLVQSGAEVKKPGASVKVSCKASGYAFSSSWMNWVRQAPGQGLEWMGRIYPGDGDTNYAQKFQGRVTMTRDTSTSTVYMELSSLRSEDTAVYYCARLLRNQPGESYAMDYWGQGTLVTVSS

SEQ ID NO: 1666 - protein, 123 aa, Artificial Sequence
  Description of Artificial Sequence: Synthetic polypeptide
  Synthetic Construct
QVQLVQSGAEVKKPGASVKVSCKASGYAFSSSWMNWVRQAPGQGLEWIGRIYPGDGDTNYAQKFQGRVTMTADTSTSTVYMELSSLRSEDTAVYYCARLLRNQPGESYAMDYWGQGTLVTVSS

SEQ ID NO: 1667 - protein, 123 aa, Artificial Sequence
  Description of Artificial Sequence: Synthetic polypeptide
  Synthetic Construct
QVQLVQSGAEVKKPGASLKISCKASGYAFSSSWMNWVRQAPGQGLEWIGRIYPGDGDTNYAQKFQGRATLTADTSTSTAYMELSSLRSEDTAVYYCARLLRNQPGESYAMDYWGQGALVTVSS

SEQ ID NO: 1668 - protein, 32 aa, Artificial Sequence
  Description of Artificial Sequence: Synthetic polypeptide
  Synthetic Construct
GVPDRFSGSGSGTDFTLKISRVEADDLGVYFC

SEQ ID NO: 1669 - protein, 112 aa, Artificial Sequence
  Description of Artificial Sequence: Synthetic polypeptide
  Synthetic Construct
DVVMTQTPLTLSVTIGQPASISCKSSQSLLYSNGKTFLSWLLQRPGQSPKRLIYLVSKLDSGVPDRFAGSGSGTDFTLKISRLEADDLGIYYCMQGTHFPLTFGAGTKLELK

SEQ ID NO: 1670 - protein, 112 aa, Artificial Sequence
  Description of Artificial Sequence: Synthetic polypeptide
  Synthetic Construct
DVVMTQTPLSLPVSLGDQASISCRSSQSLVHSNGYTYLHWYLQKPGQSPKLLIYKVSNRFSGVPDRFSGSGSGTDFTLKISRVEADDLGVYFCSQSTRVPYTFGGGTKLEIK

SEQ ID NO: 1671 - protein, 126 aa, Homo sapiens; identical to SEQ ID NO: 801

SEQ ID NO: 1672 - protein, 132 aa, Artificial Sequence; identical to SEQ ID NO: 820
  Description of Artificial Sequence: Synthetic polypeptide
  Consensus Sequence
  MOD_RES (1)..(2): Any Amino Acid
  MOD_RES (5)..(5): Any naturally occurring amino acid
  MOD_RES (8)..(8): Any naturally occurring amino acid
  MOD_RES (12)..(22): Any naturally occurring amino acid
  MOD_RES (24)..(24): Any naturally occurring amino acid
  MOD_RES (26)..(26): Any naturally occurring amino acid
  MOD_RES (31)..(31): Any naturally occurring amino acid
  MOD_RES (33)..(33): Any naturally occurring amino acid
  MOD_RES (35)..(35): Any naturally occurring amino acid
  MOD_RES (37)..(37): Any naturally occurring amino acid
  MOD_RES (39)..(47): Any naturally occurring amino acid
  MOD_RES (49)..(49): Any naturally occurring amino acid
  MOD_RES (52)..(59): Any naturally occurring amino acid
  MOD_RES (61)..(61): Any naturally occurring amino acid
  MOD_RES (63)..(63): Any naturally occurring amino acid
  MOD_RES (65)..(77): Any naturally occurring amino acid
  MOD_RES (79)..(83): Any naturally occurring amino acid
  MOD_RES (85)..(85): Any Amino Acid
  MOD_RES (88)..(88): Any Amino Acid
  MOD_RES (89)..(90): Any naturally occurring amino acid
  MOD_RES (92)..(93): Any naturally occurring amino acid
  MOD_RES (95)..(95): Any naturally occurring amino acid
  MOD_RES (97)..(99): Any naturally occurring amino acid
  MOD_RES (101)..(103): Any naturally occurring amino acid
  MOD_RES (105)..(105): Any naturally occurring amino acid
  MOD_RES (107)..(107): Any naturally occurring amino acid
  MOD_RES (109)..(109): Any naturally occurring amino acid
  MOD_RES (111)..(115): Any naturally occurring amino acid
  MOD_RES (117)..(123): Any naturally occurring amino acid
  MOD_RES (125)..(131): Any naturally occurring amino acid

SEQ ID NO: 1673 - protein, 118 aa, Homo sapiens; identical to SEQ ID NO: 803

SEQ ID NO: 1674 - protein, 121 aa, Homo sapiens; identical to SEQ ID NO: 804

SEQ ID NO: 1675 - protein, 120 aa, Mus musculus; identical to SEQ ID NO: 805

SEQ ID NO: 1676 - protein, 121 aa, Mus musculus; identical to SEQ ID NO: 806

SEQ ID NO: 1677 - protein, 121 aa, Mus musculus; identical to SEQ ID NO: 807

SEQ ID NO: 1678 - protein, 112 aa, Homo sapiens; identical to SEQ ID NO: 808

SEQ ID NO: 1679 - protein, 109 aa, Homo sapiens; identical to SEQ ID NO: 809

SEQ ID NO: 1680 - protein, 114 aa, Homo sapiens; identical to SEQ ID NO: 810

SEQ ID NO: 1681 - protein, 120 aa, Homo sapiens
HLEQPQISSTKTLSKTARLECVVSGITISATSVYWYRERPGEVIQFLVSISYDGTVRKESGIPSGKFEVDRIPETSTSTLTIHNVEKQDIATYYCALWEAQQELGKKIKVFGPGTKLIIT

SEQ ID NO: 1682 - protein, 119 aa, Homo sapiens; identical to SEQ ID NO: 812

SEQ ID NO: 1683 - protein, 116 aa, Homo sapiens; identical to SEQ ID NO: 813

SEQ ID NO: 1684 - protein, 115 aa, Mus musculus; identical to SEQ ID NO: 814

SEQ ID NO: 1685 - protein, 103 aa, Mus musculus; identical to SEQ ID NO: 815

SEQ ID NO: 1686 - protein, 113 aa, Homo sapiens; identical to SEQ ID NO: 816

SEQ ID NO: 1687 - protein, 115 aa, Homo sapiens; identical to SEQ ID NO: 817

SEQ ID NO: 1688 - protein, 105 aa, Homo sapiens; identical to SEQ ID NO: 802

SEQ ID NO: 1689 - protein, 107 aa, Artificial Sequence; identical to SEQ ID NO: 821
  Description of Artificial Sequence: Synthetic polypeptide
  Consensus Sequence
  MOD_RES (3)..(4): Any Amino Acid
  MOD_RES (8)..(8): Any naturally occurring amino acid
  MOD_RES (11)..(12): Any naturally occurring amino acid
  MOD_RES (14)..(16): Any naturally occurring amino acid
  MOD_RES (18)..(25): Any naturally occurring amino acid
  MOD_RES (28)..(28): Any naturally occurring amino acid
  MOD_RES (30)..(30): Any naturally occurring amino acid
  MOD_RES (32)..(32): Any naturally occurring amino acid
  MOD_RES (34)..(34): Any naturally occurring amino acid
  MOD_RES (36)..(38): Any naturally occurring amino acid
  MOD_RES (40)..(44): Any naturally occurring amino acid
  MOD_RES (48)..(49): Any naturally occurring amino acid
  MOD_RES (51)..(54): Any naturally occurring amino acid
  MOD_RES (56)..(76): Any naturally occurring amino acid
  MOD_RES (78)..(81): Any naturally occurring amino acid
  MOD_RES (82)..(82): Any Amino Acid
  MOD_RES (84)..(84): Any Amino Acid
  MOD_RES (85)..(87): Any naturally occurring amino acid
  MOD_RES (89)..(89): Any naturally occurring amino acid
  MOD_RES (91)..(95): Any naturally occurring amino acid
  MOD_RES (99)..(100): Any naturally occurring amino acid
  MOD_RES (102)..(102): Any naturally occurring amino acid

SEQ ID NO: 1690 - protein, 101 aa, Artificial Sequence
  Description of Artificial Sequence: Synthetic polypeptide
  Synthetic Construct
DIVMTQTPLSLSVTPGQPASISCKSSQSLLHSDGKTYLYWYLQKPGQSPQLLIYEVSNRFSGVPDRFSGSGSGTDFTLKISRVEAEDVGVYYCMQSIQLPP

SEQ ID NO: 1691 - protein, 12 aa, Artificial Sequence
  Description of Artificial Sequence: Synthetic peptide
  Synthetic Construct
YTFGQGTKLEIK

SEQ ID NO: 1692 - protein, 112 aa, Artificial Sequence; identical to SEQ ID NO: 1670
  Description of Artificial Sequence: Synthetic polypeptide
  Synthetic Construct

SEQ ID NO: 1693 - protein, 111 aa, Artificial Sequence
  Description of Artificial Sequence: Synthetic polypeptide
  Synthetic Construct
DIVMTQTPLSLSVTPGQPASISCKSSQSLLHSDGKTYLYWYLQKPGQSPQLLIYEVSNRFSGVPDRFSGSGSGTDFTLKISRVEAEDVGVYYCMQSIQLPPFGQGTKLEIK

SEQ ID NO: 1694 - protein, 112 aa, Artificial Sequence; identical to SEQ ID NO: 1663
  Description of Artificial Sequence: Synthetic polypeptide
  Synthetic Construct

SEQ ID NO: 1695 - protein, 112 aa, Artificial Sequence; identical to SEQ ID NO: 1664
  Description of Artificial Sequence: Synthetic polypeptide
  Synthetic Construct

SEQ ID NO: 1696 - protein, 98 aa, Artificial Sequence
  Description of Artificial Sequence: Synthetic polypeptide
  Synthetic Construct
QVQLVQSGAEVKKPGASVKVSCKASGYTFTSYYMHWVRQAPGQGLEWMGIINPSGGSTSYAQKFQGRVTMTRDTSTSTVYMELSSLRSEDTAVYYCAR

SEQ ID NO: 1697 - protein, 15 aa, Artificial Sequence
  Description of Artificial Sequence: Synthetic peptide
  Synthetic Construct
YFDYWGQGTLVTVSS

SEQ ID NO: 1698 - protein, 123 aa, Artificial Sequence; identical to SEQ ID NO: 1341
  Description of Artificial Sequence: Synthetic polypeptide
  Synthetic Construct

SEQ ID NO: 1699 - protein, 109 aa, Artificial Sequence
  Description of Artificial Sequence: Synthetic polypeptide
  Synthetic Construct
QVQLVQSGAEVKKPGASVKVSCKASGYTFTSYYMHWVRQAPGQGLEWMGIINPSGGSTSYAQKFQGRVTMTRDTSTSTVYMELSSLRSEDTAVYYCARWGQGTLVTVSS

SEQ ID NO: 1700 - protein, 123 aa, Artificial Sequence; identical to SEQ ID NO: 1665
  Description of Artificial Sequence: Synthetic polypeptide
  Synthetic Construct

SEQ ID NO: 1701 - protein, 123 aa, Artificial Sequence; identical to SEQ ID NO: 1666
  Description of Artificial Sequence: Synthetic polypeptide
  Synthetic Construct

SEQ ID NO: 1702 - protein, 123 aa, Artificial Sequence; identical to SEQ ID NO: 1667
  Description of Artificial Sequence: Synthetic polypeptide
  Synthetic Construct

SEQ ID NO: 1703 - protein, 19 aa, Artificial Sequence
  Description of Artificial Sequence: Synthetic peptide
  Synthetic Construct
  MOD_RES (1)..(1): D or E
  MOD_RES (2)..(3): Any Amino Acid or absent
  MOD_RES (5)..(6): Any Amino Acid
  MOD_RES (7)..(7): L or I
  MOD_RES (8)..(9): Any Amino Acid or absent
  MOD_RES (10)..(15): Any naturally occurring amino acid
  MOD_RES (17)..(18): Any Amino Acid
  MOD_RES (19)..(19): L or I
XXXYXXXXXXXXXXXYXXX

SEQ ID NO: 1704 - protein, 9 aa, Artificial Sequence
  Description of Artificial Sequence: Synthetic peptide
  Synthetic Construct
  MOD_RES (5)..(5): F or V
  MOD_RES (7)..(7): G or E
GDLWXPXES

SEQ ID NO: 1705 - protein, 21 aa, Artificial Sequence
  Description of Artificial Sequence: Synthetic peptide
  Synthetic Construct
MEVGWYRSPFSRVVHLYRNGK

SEQ ID NO: 1706 - protein, 110 aa, Artificial Sequence; identical to SEQ ID NO: 207
  Description of Artificial Sequence: Synthetic polypeptide
  Synthetic Construct

SEQ ID NO: 1707 - protein, 113 aa, Artificial Sequence; identical to SEQ ID NO: 3
  Description of Artificial Sequence: Synthetic polypeptide
  Synthetic Construct

SEQ ID NO: 1708 - protein, 17 aa, Artificial Sequence
  Description of Artificial Sequence: Synthetic peptide
  Synthetic Construct
RIYPGDGDTNYNGEFRV

SEQ ID NO: 1709 - protein, 227 aa, Mus musculus; identical to SEQ ID NO: 822

SEQ ID NO: 1710 - protein, 228 aa, Rattus norvegicus; identical to SEQ ID NO: 823

SEQ ID NO: 1711 - protein, 260 aa, Macaca mulatta; identical to SEQ ID NO: 824

SEQ ID NO: 1712 - protein, 230 aa, Macaca fascicularis
MEPLRLLILLFATELSGAHNTTVFQGVEGQSLQVSCPYDSMKHWGRRKAWCRQLGEKGPCQRVVSTHNLWLLSFLRRRNGSTAITDDTLGGTLTITLRNLQPHDAGFYQCQSLHGSEADTLRKVLVEVLADPLDHRDAGDLWVPGESESFEDAHVEHSISRSLLEGEIPFPPTSVLLLLACIFLIKILAASALWAAAWHGQKPGTHPPSEPDCGHDPGHQLQTLPGLRDT

SEQ ID NO: 1713 - protein, 230 aa, Equus caballus; identical to SEQ ID NO: 826

SEQ ID NO: 1714 - protein, 233 aa, Sus scrofa; identical to SEQ ID NO: 827

SEQ ID NO: 1715 - protein, 230 aa, Canis familiaris; identical to SEQ ID NO: 828

SEQ ID NO: 1716 - protein, 26 aa, Artificial Sequence
  Description of Artificial Sequence: Synthetic peptide
  Synthetic Construct
QVQLVQSGAEVKKPGSSVKVSCKASG

SEQ ID NO: 1717 - protein, 26 aa, Artificial Sequence
  Description of Artificial Sequence: Synthetic peptide
  Synthetic Construct
EVQLVQSGAEVKKPGSSVKVSCKASG

SEQ ID NO: 1718 - protein, 26 aa, Artificial Sequence
  Description of Artificial Sequence: Synthetic peptide
  Synthetic Construct
QVQLVQSGAEVKKPGASVKVSCKASG

SEQ ID NO: 1719 - protein, 14 aa, Artificial Sequence
  Description of Artificial Sequence: Synthetic peptide
  Synthetic Construct
WVRQAPGQGLEWMG

SEQ ID NO: 1720 - protein, 14 aa, Artificial Sequence
  Description of Artificial Sequence: Synthetic peptide
  Synthetic Construct
WVRQAPGQRLEWIG

SEQ ID NO: 1721 - protein, 30 aa, Artificial Sequence
  Description of Artificial Sequence: Synthetic polypeptide
  Synthetic Construct
RVTITADESTSTAYMELSSLRSEDTAVYYC

SEQ ID NO: 1722 - protein, 30 aa, Artificial Sequence
  Description of Artificial Sequence: Synthetic polypeptide
  Synthetic Construct
RVTITADTSASTAYMELSSLRSEDTAVYYC

SEQ ID NO: 1723 - protein, 11 aa, Artificial Sequence
  Description of Artificial Sequence: Synthetic peptide
  Synthetic Construct
WGQGTLVTVSS

SEQ ID NO: 1724 - protein, 23 aa, Artificial Sequence
  Description of Artificial Sequence: Synthetic peptide
  Synthetic Construct
DVVMTQTPLSLSVTPGQPASISC

SEQ ID NO: 1725 - protein, 23 aa, Artificial Sequence
  Description of Artificial Sequence: Synthetic peptide
  Synthetic Construct
GVVMTQTPLSLSVTPGQPASISC

SEQ ID NO: 1726 - protein, 23 aa, Artificial Sequence
  Description of Artificial Sequence: Synthetic peptide
  Synthetic Construct
GVVMAQTPLSLSVTPGQPASISC

SEQ ID NO: 1727 - protein, 23 aa, Artificial Sequence
  Description of Artificial Sequence: Synthetic peptide
  Synthetic Construct
DVVMTQSPDSLAVSLGERATINC

SEQ ID NO: 1728 - protein, 15 aa, Artificial Sequence
  Description of Artificial Sequence: Synthetic peptide
  Synthetic Construct
WYLQKPGQSPQLLIY

SEQ ID NO: 1729 - protein, 15 aa, Artificial Sequence
  Description of Artificial Sequence: Synthetic peptide
  Synthetic Construct
WYQQKPGQSPKLLIY

SEQ ID NO: 1730 - protein, 32 aa, Artificial Sequence
  Description of Artificial Sequence: Synthetic polypeptide
  Synthetic Construct
GVPDRFSGSGSGTDFTLKISRVEAEDVGVYYC

SEQ ID NO: 1731 - protein, 32 aa, Artificial Sequence
  Description of Artificial Sequence: Synthetic polypeptide
  Synthetic Construct
GVPDRFSGSGSGTDFTLTISSLQAEDVAVYYC

SEQ ID NO: 1732 - protein, 10 aa, Artificial Sequence
  Description of Artificial Sequence: Synthetic peptide
  Synthetic Construct
FGQGTKLEIK

SEQ ID NO: 1733 - protein, 10 aa, Artificial Sequence
  Description of Artificial Sequence: Synthetic peptide
  Synthetic Construct
FGGGTKVEIK

SEQ ID NO: 1734 - protein, 123 aa, Artificial Sequence
  Description of Artificial Sequence: Synthetic polypeptide
  Synthetic Construct
QVQLVQSGAEVKKPGSSVKVSCKASGYAFSSSWMNWVRQAPGQGLEWMGRIYPGDGDTNYAQKFQGRVTITADESTSTAYMELSSLRSEDTAVYYCARLLRNQPGESYAMDYWGQGTLVTVSS

SEQ ID NO: 1735 - protein, 123 aa, Artificial Sequence
  Description of Artificial Sequence: Synthetic polypeptide
  Synthetic Construct
QVQLVQSGAEVKKPGSSVKVSCKASGYAFSSSWMNWVRQAPGQGLEWMGRIYPGGGDTNYAQKFQGRVTITADESTSTAYMELSSLRSEDTAVYYCARLLRNQPGESYAMDYWGQGTLVTVSS

SEQ ID NO: 1736 - protein, 123 aa, Artificial Sequence
  Description of Artificial Sequence: Synthetic polypeptide
  Synthetic Construct
QVQLVQSGAEVKKPGSSVKVSCKASGYAFSSSWMNWVRQAPGQGLEWMGRIYPGEGDTNYAQKFQGRVTITADESTSTAYMELSSLRSEDTAVYYCARLLRNQPGESYAMDYWGQGTLVTVSS

SEQ ID NO: 1737 - protein, 123 aa, Artificial Sequence
  Description of Artificial Sequence: Synthetic polypeptide
  Synthetic Construct
QVQLVQSGAEVKKPGSSVKVSCKASGYAFSSSWMNWVRQAPGQGLEWMGRIYPGQGDTNYAQKFQGRVTITADESTSTAYMELSSLRSEDTAVYYCARLLRNQPGESYAMDYWGQGTLVTVSS

SEQ ID NO: 1738 - protein, 123 aa, Artificial Sequence
  Description of Artificial Sequence: Synthetic polypeptide
  Synthetic Construct
QVQLVQSGAEVKKPGSSVKVSCKASGYAFSLSWMNWVRQAPGQGLEWMGRIYPGDGDTNYAQKFRGRVTITADESTSTAYMELSSLRSEDTAVYYCARLLRNQPGESYAMDYWGQGTLVTVSS

SEQ ID NO: 1739 - protein, 123 aa, Artificial Sequence
  Description of Artificial Sequence: Synthetic polypeptide
  Synthetic Construct
QVQLVQSGAEVKKPGSSVKVSCKASGYAFSLSWMNWVRQAPGQGLEWMGRIYPGDGDTNYARKFQGRVTITADESTSTAYMELSSLRSEDTAVYYCARLLRNQPGSSYAMDYWGQGTLVTVSS

SEQ ID NO: 1740 - protein, 123 aa, Artificial Sequence
  Description of Artificial Sequence: Synthetic polypeptide
  Synthetic Construct
QVQLVQSGAEVKKPGSSVKVSCKASGYAFSRSWMNWVRQAPGQGLEWMGRIYPGDGDTNYAQKFQGRVTITADESTSTAYMELSSLRSEDTAVYYCARLLRNQPGASYAMDYWGQGTLVTVSS

SEQ ID NO: 1741 - protein, 123 aa, Artificial Sequence
  Description of Artificial Sequence: Synthetic polypeptide
  Synthetic Construct
QVQLVQSGAEVKKPGSSVKVSCKASGYAFSSDWMNWVRQAPGQGLEWMGRIYPGDGDTNYAQKFQGRVTITADESTSTAYMELSSLRSEDTAVYYCARLLRNQPGESYAMDYWGQGTLVTVSS

SEQ ID NO: 1742 - protein, 123 aa, Artificial Sequence
  Description of Artificial Sequence: Synthetic polypeptide
  Synthetic Construct
QVQLVQSGAEVKKPGSSVKVSCKASGYAFSSDWMNWVRQAPGQGLEWMGRIYPGDGDTNYARKFQGRVTITADESTSTAYMELSSLRSEDTAVYYCARLLRNQPGESYAMDYWGQGTLVTVSS

SEQ ID NO: 1743 - protein, 123 aa, Artificial Sequence
  Description of Artificial Sequence: Synthetic polypeptide
  Synthetic Construct
QVQLVQSGAEVKKPGSSVKVSCKASGYAFSSHWMNWVRQAPGQGLEWMGRIYPGDGDTNYAHKFQGRVTITADESTSTAYMELSSLRSEDTAVYYCARLLRNQPGESYAMDYWGQGTLVTVSS

SEQ ID NO: 1744 - protein, 123 aa, Artificial Sequence
  Description of Artificial Sequence: Synthetic polypeptide
  Synthetic Construct
QVQLVQSGAEVKKPGSSVKVSCKASGYAFSSHWMNWVRQAPGQGLEWMGRIYPGDGDTNYAQKFKGRVTITADESTSTAYMELSSLRSEDTAVYYCARLLRNQPGESYAMDYWGQGTLVTVSS

SEQ ID NO: 1745 - protein, 123 aa, Artificial Sequence
  Description of Artificial Sequence: Synthetic polypeptide
  Synthetic Construct
QVQLVQSGAEVKKPGSSVKVSCKASGYAFSSHWMNWVRQAPGQGLEWMGRIYPGDGDTNYAQKFQGRVTITADESTSTAYMELSSLRSEDTAVYYCARLLRNQPGESYAMDYWGQGTLVTVSS

SEQ ID NO: 1746 - protein, 123 aa, Artificial Sequence
  Description of Artificial Sequence: Synthetic polypeptide
  Synthetic Construct
QVQLVQSGAEVKKPGSSVKVSCKASGYAFSSHWMNWVRQAPGQGLEWMGRIYPGDGDTNYAQKFRGRVTITADESTSTAYMELSSLRSEDTAVYYCARLLRNQPGASYAMDYWGQGTLVTVSS

SEQ ID NO: 1747 - protein, 123 aa, Artificial Sequence
  Description of Artificial Sequence: Synthetic polypeptide
  Synthetic Construct
QVQLVQSGAEVKKPGSSVKVSCKASGYAFSSHWMNWVRQAPGQGLEWMGRIYPGDGDTNYAQKRQGRVTITADESTSTAYMELSSLRSEDTAVYYCARLLRNQPGESYAMDYWGQGTLVTVSS

SEQ ID NO: 1748 - protein, 123 aa, Artificial Sequence
  Description of Artificial Sequence: Synthetic polypeptide
  Synthetic Construct
QVQLVQSGAEVKKPGSSVKVSCKASGYAFSSHWMNWVRQAPGQGLEWMGRIYPGDGDTNYAQKWQGRVTITADESTSTAYMELSSLRSEDTAVYYCARLLRNQPGSSYAMDYWGQGTLVTVSS

SEQ ID NO: 1749 - protein, 123 aa, Artificial Sequence
  Description of Artificial Sequence: Synthetic polypeptide
  Synthetic Construct
QVQLVQSGAEVKKPGSSVKVSCKASGYAFSSHWMNWVRQAPGQGLEWMGRIYPGDGDTNYARKFQGRVTITADESTSTAYMELSSLRSEDTAVYYCARLLRNQPGESYAMDYWGQGTLVTVSS

SEQ ID NO: 1750 - protein, 123 aa, Artificial Sequence
  Description of Artificial Sequence: Synthetic polypeptide
  Synthetic Construct
QVQLVQSGAEVKKPGSSVKVSCKASGYAFSSHWMNWVRQAPGQGLEWMGRIYPGDGDTNYAWKFQGRVTITADESTSTAYMELSSLRSEDTAVYYCARLLRNQPGESYAMDYWGQGTLVTVSS

SEQ ID NO: 1751 - protein, 123 aa, Artificial Sequence
  Description of Artificial Sequence: Synthetic polypeptide
  Synthetic Construct
QVQLVQSGAEVKKPGSSVKVSCKASGYAFSSHWMNWVRQAPGQGLEWMGRIYPGDGDTNYAYKFQGRVTITADESTSTAYMELSSLRSEDTAVYYCARLLRNQPGESYAMDYWGQGTLVTVSS

SEQ ID NO: 1752 - protein, 123 aa, Artificial Sequence
  Description of Artificial Sequence: Synthetic polypeptide
  Synthetic Construct
QVQLVQSGAEVKKPGSSVKVSCKASGYAFSSHWMNWVRQAPGQGLEWMGRIYPGDGQTNYAQKRQGRVTITADESTSTAYMELSSLRSEDTAVYYCARLLRNQPGESYAMDYWGQGTLVTVSS

SEQ ID NO: 1753 - protein, 123 aa, Artificial Sequence
  Description of Artificial Sequence: Synthetic polypeptide
  Synthetic Construct
QVQLVQSGAEVKKPGSSVKVSCKASGYAFSSHWMNWVRQAPGQGLEWMGRIYPGGGDTNYAQKFQGRVTITADESTSTAYMELSSLRSEDTAVYYCARLLRNQPGESYAMDYWGQGTLVTVSS

SEQ ID NO: 1754 - protein, 123 aa, Artificial Sequence
  Description of Artificial Sequence: Synthetic polypeptide
  Synthetic Construct
QVQLVQSGAEVKKPGSSVKVSCKASGYAFSSHWMNWVRQAPGQGLEWMGRIYPGGGDTNYAQKFRGRVTITADESTSTAYMELSSLRSEDTAVYYCARLLRNQPGESYAMDYWGQGTLVTVSS

SEQ ID NO: 1755 - protein, 123 aa, Artificial Sequence
  Description of Artificial Sequence: Synthetic polypeptide
  Synthetic Construct
QVQLVQSGAEVKKPGSSVKVSCKASGYAFSSHWMNWVRQAPGQGLEWMGRIYPGGGDTNYAQKRQGRVTITADESTSTAYMELSSLRSEDTAVYYCARLLRNQPGESYAMDYWGQGTLVTVSS

SEQ ID NO: 1756 - protein, 123 aa, Artificial Sequence
  Description of Artificial Sequence: Synthetic polypeptide
  Synthetic Construct
QVQLVQSGAEVKKPGSSVKVSCKASGYAFSSHWMNWVRQAPGQGLEWMGRIYPGQGDTNYAQKFQGRVTITADESTSTAYMELSSLRSEDTAVYYCARLLRNQPGESYAMDYWGQGTLVTVSS

SEQ ID NO: 1757 - protein, 123 aa, Artificial Sequence
  Description of Artificial Sequence: Synthetic polypeptide
  Synthetic Construct
QVQLVQSGAEVKKPGSSVKVSCKASGYAFSSHWMNWVRQAPGQGLEWMGRIYPGVGDTNYAQKFQGRVTITADESTSTAYMELSSLRSEDTAVYYCARLLRNQPGESYAMDYWGQGTLVTVSS

SEQ ID NO: 1758 - protein, 123 aa, Artificial Sequence
  Description of Artificial Sequence: Synthetic polypeptide
  Synthetic Construct
QVQLVQSGAEVKKPGSSVKVSCKASGYAFSSQWMNWVRQAPGQGLEWMGRIYPGDGDTNYAQKFQGRVTITADESTSTAYMELSSLRSEDTAVYYCARLLRNQPGESYAMDYWGQGTLVTVSS

SEQ ID NO: 1759 - protein, 123 aa, Artificial Sequence
  Description of Artificial Sequence: Synthetic polypeptide
  Synthetic Construct
QVQLVQSGAEVKKPGSSVKVSCKASGYAFSSQWMNWVRQAPGQGLEWMGRIYPGDGDTNYAWKFQGRVTITADESTSTAYMELSSLRSEDTAVYYCARLLRNQPGESYAMDYWGQGTLVTVSS

SEQ ID NO: 1760 - protein, 123 aa, Artificial Sequence
  Description of Artificial Sequence: Synthetic polypeptide
  Synthetic Construct
QVQLVQSGAEVKKPGSSVKVSCKASGYAFSSQWMNWVRQAPGQGLEWMGRIYPGGGDTNYARKFQGRVTITADESTSTAYMELSSLRSEDTAVYYCARLLRNQPGESYAMDYWGQGTLVTVSS

SEQ ID NO: 1761 - protein, 123 aa, Artificial Sequence
  Description of Artificial Sequence: Synthetic polypeptide
  Synthetic Construct
QVQLVQSGAEVKKPGSSVKVSCKASGYAFSSEWMNWVRQAPGQGLEWMGRIYPGDGDTNYAQKFQGRVTITADESTSTAYMELSSLRSEDTAVYYCARLLRNQPGESYAMDYWGQGTLVTVSS

SEQ ID NO: 1762 - protein, 123 aa, Artificial Sequence
  Description of Artificial Sequence: Synthetic polypeptide
  Synthetic Construct
EVQLVQSGAEVKKPGSSVKVSCKASGYAFSSSWMNWVRQAPGQGLEWMGRIYPGDGDTNYAQKFQGRVTITADESTSTAYMELSSLRSEDTAVYYCARLLRNQPGESYAMDYWGQGTLVTVSS

SEQ ID NO: 1763 - protein, 123 aa, Artificial Sequence
  Description of Artificial Sequence: Synthetic polypeptide
  Synthetic Construct
QVQLVQSGAEVKKPGASVKVSCKASGYAFSSSWMNWVRQAPGQRLEWIGRIYPGDGDTNYAQKFQGRVTITADTSASTAYMELSSLRSEDTAVYYCARLLRNQPGESYAMDYWGQGTLVTVSS

SEQ ID NO: 1764 - protein, 123 aa, Artificial Sequence
  Description of Artificial Sequence: Synthetic polypeptide
  Synthetic Construct
QVQLVQSGAEVKKPGASVKVSCKASGYAFWSSWMNWVRQAPGQRLEWIGRIYPGDGDTNYAQKFQGRVTITADTSASTAYMELSSLRSEDTAVYYCARLLRNQPGESYAHDYWGQGTLVTVSS

SEQ ID NO: 1765 - protein, 123 aa, Artificial Sequence
  Description of Artificial Sequence: Synthetic polypeptide
  Synthetic Construct
QVQLVQSGAEVKKPGASVKVSCKASGYAFSSSWMNWVRQAPGQRLEWIGRIYPGDGDTNYARKFQGRVTITADTSASTAYMELSSLRSEDTAVYYCARLLRNQPGASYAMDYWGQGTLVTVSS

SEQ ID NO: 1766 - protein, 123 aa, Artificial Sequence
  Description of Artificial Sequence: Synthetic polypeptide
  Synthetic Construct
QVQLVQSGAEVKKPGASVKVSCKASGYAFSSQWMNWVRQAPGQRLEWIGRIYPGGGDTNYAGKFQGRVTITADTSASTAYMELSSLRSEDTAVYYCARLLRNQPGESYAMDYWGQGTLVTVSS

SEQ ID NO: 1767 - protein, 123 aa, Artificial Sequence
  Description of Artificial Sequence: Synthetic polypeptide
  Synthetic Construct
QVQLVQSGAEVKKPGSSVKVSCKASGYAFSSHWMNWVRQAPGQGLEWMGRIYPGGGDTNYAQKFRGRVTITADESTSTAYMELSSLRSEDTAVYYCARLLRNQPGASYAMDYWGQGTLVTVSS

SEQ ID NO: 1768 - protein, 123 aa, Artificial Sequence
  Description of Artificial Sequence: Synthetic polypeptide
  Synthetic Construct
QVQLVQSGAEVKKPGSSVKVSCKASGYAFSSHWMNWVRQAPGQGLEWMGRIYPGEGDTNYAQKFRGRVTITADESTSTAYMELSSLRSEDTAVYYCARLLRNQPGASYAMDYWGQGTLVTVSS

SEQ ID NO: 1769 - protein, 123 aa, Artificial Sequence
  Description of Artificial Sequence: Synthetic polypeptide
  Synthetic Construct
QVQLVQSGAEVKKPGSSVKVSCKASGYAFSSHWMNWVRQAPGQGLEWMGRIYPGGGDTNYARKFRGRVTITADESTSTAYMELSSLRSEDTAVYYCARLLRNQPGASYAMDYWGQGTLVTVSS

SEQ ID NO: 1770 - protein, 123 aa, Artificial Sequence
  Description of Artificial Sequence: Synthetic polypeptide
  Synthetic Construct
QVQLVQSGAEVKKPGSSVKVSCKASGYAFSSDWMNWVRQAPGQGLEWMGRIYPGEGDTNYARKFQGRVTITADESTSTAYMELSSLRSEDTAVYYCARLLRNKPGESYAMDYWGQGTLVTVSS

SEQ ID NO: 1771 - protein, 123 aa, Artificial Sequence
  Description of Artificial Sequence: Synthetic polypeptide
  Synthetic Construct
QVQLVQSGAEVKKPGSSVKVSCKASGYAFSSDWMNWVRQAPGQGLEWMGRIYPGEGDTNYARKFHGRVTITADESTSTAYMELSSLRSEDTAVYYCARLLRNKPGESYAMDYWGQGTLVTVSS

SEQ ID NO: 1772 - protein, 123 aa, Artificial Sequence
  Description of Artificial Sequence: Synthetic polypeptide
  Synthetic Construct
EVQLVQSGAEVKKPGSSVKVSCKASGYAFSSDWMNWVRQAPGQGLEWMGRIYPGEGDTNYARKFHGRVTITADESTSTAYMELSSLRSEDTAVYYCARLLRNKPGESYAMDYWGQGTLVTVSS

SEQ ID NO: 1773 - protein, 123 aa, Artificial Sequence
  Description of Artificial Sequence: Synthetic polypeptide
  Synthetic Construct
QVQLVQSGAEVKKPGSSVKVSCKASGYAFSSHWMNWVRQAPGQGLEWMGRIYPGEGDTNYAQKFHGRVTITADESTSTAYMELSSLRSEDTAVYYCARLLRNQPGESYAMDYWGQGTLVTVSS

SEQ ID NO: 1774 - protein, 123 aa, Artificial Sequence
  Description of Artificial Sequence: Synthetic polypeptide
  Synthetic Construct
EVQLVQSGAEVKKPGSSVKVSCKASGYAFSSHWMNWVRQAPGQGLEWMGRIYPGEGDTNYAQKFHGRVTITADESTSTAYMELSSLRSEDTAVYYCARLLRNQPGESYAMDYWGQGTLVTVSS

SEQ ID NO: 1775 - protein, 123 aa, Artificial Sequence
  Description of Artificial Sequence: Synthetic polypeptide
  Synthetic Construct
QVQLVQSGAEVKKPGSSVKVSCKASGYAFSSHWMNWVRQAPGQGLEWMGRIYPGEGDTNYAQKFHGRVTITADESTSTAYMELSSLRSEDTAVYYCARLLRNKPGESYAMDYWGQGTLVTVSS

SEQ ID NO: 1776 - protein, 123 aa, Artificial Sequence
  Description of Artificial Sequence: Synthetic polypeptide
  Synthetic Construct
EVQLVQSGAEVKKPGSSVKVSCKASGYAFSSHWMNWVRQAPGQGLEWMGRIYPGEGDTNYAQKFHGRVTITADESTSTAYMELSSLRSEDTAVYYCARLLRNKPGESYAMDYWGQGTLVTVSS

SEQ ID NO: 1777 - protein, 123 aa, Artificial Sequence
  Description of Artificial Sequence: Synthetic polypeptide
  Synthetic Construct
QVQLVQSGAEVKKPGSSVKVSCKASGYAFSSQWMNWVRQAPGQGLEWMGRIYPGEGDTNYARKFQGRVTITADESTSTAYMELSSLRSEDTAVYYCARLLRNQPGESYAMDYWGQGTLVTVSS

SEQ ID NO: 1778 - protein, 123 aa, Artificial Sequence
  Description of Artificial Sequence: Synthetic polypeptide
  Synthetic Construct
QVQLVQSGAEVKKPGASVKVSCKASGYAFSSQWMNWVRQAPGQRLEWIGRIYPGEGDTNYAGKFQGRVTITADTSASTAYMELSSLRSEDTAVYYCARLLRNQPGESYAMDYWGQGTLVTVSS

SEQ ID NO: 1779 - protein, 123 aa, Artificial Sequence
  Description of Artificial Sequence: Synthetic polypeptide
  Synthetic Construct
QVQLVQSGAEVKKPGSSVKVSCKASGYAFSSSWMNWVRQAPGQGLEWMGRIYPGDGDTNYAQKFQGRATITADTSTSTAYMELSSLRSEDTAVYYCARLLRNQPGESYAMDYWGQGTLVTVSS

SEQ ID NO: 1780 - protein, 123 aa, Artificial Sequence; identical to SEQ ID NO: 1665
  Description of Artificial Sequence: Synthetic polypeptide
  Synthetic Construct

SEQ ID NO: 1781 - protein, 123 aa, Artificial Sequence; identical to SEQ ID NO: 1666
  Description of Artificial Sequence: Synthetic polypeptide
  Synthetic Construct

SEQ ID NO: 1782 - protein, 123 aa, Artificial Sequence; identical to SEQ ID NO: 1667
  Description of Artificial Sequence: Synthetic polypeptide
  Synthetic Construct

SEQ ID NO: 1783 - protein, 123 aa, Artificial Sequence
  Description of Artificial Sequence: Synthetic polypeptide
  Synthetic Construct
QVQLVQSGAEVVKPGASLKISCKASGYAFSSSWMNWVRQAPGQGLEWIGRIYPGDGDTNYNQKFQGRATLTADTSTSTAYMELSSLRSEDTAVYFCARLLRNQPGESYAMDYWGQGALVTVSS

SEQ ID NO: 1784 - protein, 123 aa, Artificial Sequence
  Description of Artificial Sequence: Synthetic polypeptide
  Synthetic Construct
QVQLVQSGAEVKKPGASLKISCKASGYAFSSSWMNWVRQAPGQGLEWIGRIYPGDGDTNYNGEFRVRATLTADTSTSTAYMELSSLRSEDTAVYYCARLLRNQPGESYAMDYWGQGALVTVSS

SEQ ID NO: 1785 - protein, 123 aa, Artificial Sequence
  Description of Artificial Sequence: Synthetic polypeptide
  Synthetic Construct
QVQLVQSGAEVKKPGASVKVSCKASGYAFSSSWMNWVRQAPGQGLEWIGRIYPGDGDTNYNGEFRVRATLTADTSTSTAYMELSSLRSEDTAVYFCARLLRNQPGESYAMDYWGQGTLVTVSS

SEQ ID NO: 1786 - protein, 123 aa, Artificial Sequence
  Description of Artificial Sequence: Synthetic polypeptide
  Synthetic Construct
QVQLVQSGAEVKKPGASVKVSCKASGYAFSSSWMNWVRQAPGQGLEWIGRIYPGDGDTNYAQKFQGRATLTADTSTSTAYMELSSLRSEDTAVYFCARLLRNQPGESYAMDYWGQGTLVTVSS

SEQ ID NO: 1787 - protein, 123 aa, Artificial Sequence
  Description of Artificial Sequence: Synthetic polypeptide
  Synthetic Construct
QVQLVQSGAEVKKPGASVKVSCKASGYAFSSSWMNWVRQAPGQGLEWIGRIYPGDGDTNYAQKFQGRATMTADTSTSTAYMELSSLRSEDTAVYYCARLLRNQPGESYAMDYWGQGTLVTVSS

SEQ ID NO: 1788 - protein, 123 aa, Artificial Sequence
  Description of Artificial Sequence: Synthetic polypeptide
  Synthetic Construct
QVQLVQSGAEVKKPGASVKVSCKASGYAFSSSWMNWVRQAPGQGLEWMGRIYPGDGDTNYAQKFQGRVTMTADTSTSTAYMELSSLRSEDTAVYYCARLLRNQPGESYAMDYWGQGTLVTVSS

SEQ ID NO: 1789 - protein, 123 aa, Artificial Sequence
  Description of Artificial Sequence: Synthetic polypeptide
  Synthetic Construct
QVQLVQSGAEVKKPGSSVKVSCKASGYAFSSSWMNWVRQAPGQGLEWIGRIYPGDGDTNYNGEFRVRATLTADTSTTTAYMELSSLRSEDTAVYFCARLLRNQPGESYAMDYWGQGTLVTVSS

SEQ ID NO: 1790 - protein, 123 aa, Artificial Sequence
  Description of Artificial Sequence: Synthetic polypeptide
  Synthetic Construct
QVQLVQSGAEVKKPGSSVKVSCKASGYAFSSSWMNWVRQAPGQGLEWIGRIYPGDGDTNYAQKFQGRATLTADTSTTTAYMELSSLRSEDTAVYFCARLLRNQPGESYAMDYWGQGTLVTVSS

SEQ ID NO: 1791 - protein, 123 aa, Artificial Sequence
  Description of Artificial Sequence: Synthetic polypeptide
  Synthetic Construct
QVQLVQSGAEVKKPGSSVKVSCKASGYAFSSSWMNWVRQAPGQGLEWIGRIYPGDGDTNYAQKFQGRATITADTSTSTAYMELSSLRSEDTAVYFCARLLRNQPGESYAMDYWGQGTLVTVSS

SEQ ID NO: 1792 - protein, 123 aa, Artificial Sequence
  Description of Artificial Sequence: Synthetic polypeptide
  Synthetic Construct
EVQLLESGGGLVQPGGSLRLSCAASGYAFSSSWMNWVRQAPGKGLEWIGRIYPGDGDTNYAQKFQGRATISADTSKNTAYLQMNSLRAEDTAVYYCARLLRNQPGESYAMDYWGQGTLVTVSS

SEQ ID NO: 1793 - protein, 123 aa, Artificial Sequence
  Description of Artificial Sequence: Synthetic polypeptide
  Synthetic Construct
QVQLVQSGAEVKKPGASVKVSCKASGYAFSSSWMNWVRQAPGQRLEWMGRIYPGDGDTNYAQKFQGRVTITRDTSASTAYMELSSLRSEDTAVYYCARLLRNQPGESYAMDYWGQGTLVTVSS

SEQ ID NO: 1794 - protein, 123 aa, Artificial Sequence
  Description of Artificial Sequence: Synthetic polypeptide
  Synthetic Construct
QVQLVQSGAEVKKPGASLKVSCKASGYAFSSSWMNWVRQAPGQRLEWIGRIYPGDGDTNYNGEFRVRATLTADTSASTAYMELSSLRSEDTAVYFCARLLRNQPGESYAMDYWGQGTLVTVSS

SEQ ID NO: 1795 - protein, 123 aa, Artificial Sequence
  Description of Artificial Sequence: Synthetic polypeptide
  Synthetic Construct
QVQLVQSGAEVKKPGASLKVSCKASGYAFSSSWMNWVRQAPGQRLEWIGRIYPGDGDTNYAQKFQGRATLTADTSASTAYMELSSLRSEDTAVYFCARLLRNQPGESYAMDYWGQGTLVTVSS

SEQ ID NO: 1796 - protein, 123 aa, Artificial Sequence
  Description of Artificial Sequence: Synthetic polypeptide
  Synthetic Construct
QVQLVQSGAEVKKPGASVKVSCKASGYAFSSSWMNWVRQAPGQGLEWMGRIYPGDGDTNYNGEFRVRVTMTRDTSTSTVYMELSSLRSEDTAVYYCARLLRNQPGESYAMDYWGQGTLVTVSS

SEQ ID NO: 1797 - protein, 123 aa, Artificial Sequence
  Description of Artificial Sequence: Synthetic polypeptide
  Synthetic Construct
QVQLVQSGAEVKKPGASVKVSCKASGYAFSSSWMNWVRQAPGQRLEWIGRIYPGDGDTNYAQKFQGRATITADTSASTAYMELSSLRSEDTAVYFCARLLRNQPGESYAMDYWGQGTLVTVSS

SEQ ID NO: 1798 - protein, 123 aa, Artificial Sequence
  Description of Artificial Sequence: Synthetic polypeptide
  Synthetic Construct
QVQLVQSGAEVKKPGSSVKVSCKASGYAFSSHWMNWVRQAPGQGLEWMGRIYPGEGQTNYAQKRQGRVTITADESTSTAYMELSSLRSEDTAVYYCARLLRNQPGESYAMDYWGQGTLVTVSS

SEQ ID NO: 1799 - protein, 112 aa, Artificial Sequence; identical to SEQ ID NO: 1664
  Description of Artificial Sequence: Synthetic polypeptide
  Synthetic Construct

SEQ ID NO: 1800 - protein, 112 aa, Artificial Sequence
  Description of Artificial Sequence: Synthetic polypeptide
  Synthetic Construct
DVVMTQTPLSLSVTPGQPASISCRSSQSLVHSNRYTYLHWYLQKPGQSPQLLIYKVSNRFSGVPDRFSGSGSGTDFTLKISRVEAEDVGVYYCSQSTRVPYTFGQGTKLEIK

SEQ ID NO: 1801 - protein, 112 aa, Artificial Sequence
  Description of Artificial Sequence: Synthetic polypeptide
  Synthetic Construct
DVVMTQTPLSLSVTPGQPASISCRSSQSLVHSNWYTYLHWYLQKPGQSPQLLIYKVSNRFSGVPDRFSGSGSGTDFTLKISRVEAEDVGVYYCSQSTRVPYTFGQGTKLEIK

SEQ ID NO: 1802 - protein, 112 aa, Artificial Sequence
  Description of Artificial Sequence: Synthetic polypeptide
  Synthetic Construct
GVVMTQTPLSLSVTPGQPASISCRSSQSLIHSNGYTYLHWYLQKPGQSPQLLIYKVSNRRSGVPDRFSGSGSGTDFTLKISRVEAEDVGVYYCSQSTRVPYTFGQGTKLEIK

SEQ ID NO: 1803 - protein, 112 aa, Artificial Sequence
  Description of Artificial Sequence: Synthetic polypeptide
  Synthetic Construct
GVVMTQTPLSLSVTPGQPASISCRTSQSLVHSNGYTYLHWYLQKPGQSPQLLIYKVSNRVSGVPDRFSGSGSGTDFTLKISRVEAEDVGVYYCSQSTRVPYTFGQGTKLEIK

SEQ ID NO: 1804 - protein, 112 aa, Artificial Sequence
  Description of Artificial Sequence: Synthetic polypeptide
  Synthetic Construct
GVVMTQTPLSLSVTPGQPASISCRSSQSLVHSNGYTYLHWYLQKPGQSPQLLIYKVSNRRSGVPDRFSGSGSGTDFTLKISRVEAEDVGVYYCSQSTRVPYTFGQGTKLEIK

SEQ ID NO: 1805 - protein, 112 aa, Artificial Sequence
  Description of Artificial Sequence: Synthetic polypeptide
  Synthetic Construct
DVVMTQTPLSLSVTPGQPASISCRSSRSLVHSNGYTYLHWYLQKPGQSPQLLIYKVSNRVSGVPDRFSGSGSGTDFTLKISRVEAEDVGVYYCSQSTRVPYTFGQGTKLEIK

SEQ ID NO: 1806 - protein, 112 aa, Artificial Sequence
  Description of Artificial Sequence: Synthetic polypeptide
  Synthetic Construct
GVVMTQTPLSLSVTPGQPASISCRSSRSLVHSNGYTYLHWYLQKPGQSPQLLIYKVSNRFSGVPDRFSGSGSGTDFTLKISRVEAEDVGVYYCSQSTRVPYTFGQGTKLEIK

SEQ ID NO: 1807 - protein, 112 aa, Artificial Sequence
  Description of Artificial Sequence: Synthetic polypeptide
  Synthetic Construct
GVVMTQTPLSLSVTPGQPASISCRSSSSLVHSNGYTYLHWYLQKPGQSPQLLIYKVSNRKSGVPDRFSGSGSGTDFTLKISRVEAEDVGVYYCSQSTRVPYTFGQGTKLEIK

SEQ ID NO: 1808 - protein, 112 aa, Artificial Sequence
  Description of Artificial Sequence: Synthetic polypeptide
  Synthetic Construct
GVVMTQTPLSLSVTPGQPASISCRSSRSLVHSNGYTYLHWYLQKPGQSPQLLIYKVSNRRSGVPDRFSGSGSGTDFTLKISRVEAEDVGVYYCSQSTRVPYTFGQGTKLEIK

SEQ ID NO: 1809 - protein, 112 aa, Artificial Sequence
  Description of Artificial Sequence: Synthetic polypeptide
  Synthetic Construct
GVVMTQTPLSLSVTPGQPASISCRSSRSLVHSNGYTYLHWYLQKPGQSPQLLIYKVSNRVSGVPDRFSGSGSGTDFTLKISRVEAEDVGVYYCSQSTRVPYTFGQGTKLEIK

SEQ ID NO: 1810 - protein, 112 aa, Artificial Sequence
  Description of Artificial Sequence: Synthetic polypeptide
  Synthetic Construct
GVVMAQTPLSLSVTPGQPASISCRTSQSLVHSNGYTYLHWYLQKPGQSPQLLIYKVSNRVSGVPDRFSGSGSGTDFTLKISRVEAEDVGVYYCSQSTRVPYTFGQGTKLEIK

SEQ ID NO: 1811 - protein, 112 aa, Artificial Sequence
  Description of Artificial Sequence: Synthetic polypeptide
  Synthetic Construct
DVVMTQSPDSLAVSLGERATINCRSSQSLVHSNGYTYLHWYQQKPGQSPKLLIYKVSNRFSGVPDRFSGSGSGTDFTLTISSLQAEDVAVYYCSQSTRVPYTFGGGTKVEIK

SEQ ID NO: 1812 - protein, 112 aa, Artificial Sequence
  Description of Artificial Sequence: Synthetic polypeptide
  Synthetic Construct
GVVMTQTPLSLSVTPGQPASISCRSSRSLVHSNRYTYLHWYLQKPGQSPQLLIYKVSNRRSGVPDRFSGSGSGTDFTLKISRVEAEDVGVYYCSQSTRVPYTFGQGTKLEIK

SEQ ID NO: 1813 - protein, 112 aa, Artificial Sequence
  Description of Artificial Sequence: Synthetic polypeptide
  Synthetic Construct
GVVMTQTPLSLSVTPGQPASISCRSSRSLVHSNQYTYLHWYLQKPGQSPQLLIYKVSNRRSGVPDRFSGSGSGTDFTLKISRVEAEDVGVYYCSQSTRVPYTFGQGTKLEIK

SEQ ID NO: 1814 - protein, 112 aa, Artificial Sequence
  Description of Artificial Sequence: Synthetic polypeptide
  Synthetic Construct
GVVMTQTPLSLSVTPGQPASISCRTSRSLVHSNRYTYLHWYLQKPGQSPQLLIYKVSNRRSGVPDRFSGSGSGTDFTLKISRVEAEDVGVYYCSQSTRVPYTFGQGTKLEIK

SEQ ID NO: 1815 - protein, 112 aa, Artificial Sequence
  Description of Artificial Sequence: Synthetic polypeptide
  Synthetic Construct
DVVMTQTPLSLSVTPGQPASISCRTSQSLVHSNAYTYLHWYLQKPGQSPQLLIYKVSNRVSGVPDRFSGSGSGTDFTLKISRVEAEDVGVYYCSQSTRVPYTFGQGTKLEIK

SEQ ID NO: 1816 - protein, 112 aa, Artificial Sequence
  Description of Artificial Sequence: Synthetic polypeptide
  Synthetic Construct
DVVMTQTPLSLSVTPGQPASISCRTSQSLVHSNQYTYLHWYLQKPGQSPQLLIYKVSNRVSGVPDRFSGSGSGTDFTLKISRVEAEDVGVYYCSQSTRVPYTFGQGTKLEIK

SEQ ID NO: 1817 - protein, 112 aa, Artificial Sequence
  Description of Artificial Sequence: Synthetic polypeptide
  Synthetic Construct
GVVMTQTPLSLSVTPGQPASISCRSSQSLVHSNQYTYLHWYLQKPGQSPQLLIYKVSNRRSGVPDRFSGSGSGTDFTLKISRVEAEDVGVYYCSQSTRVPYTFGQGTKLEIK

SEQ ID NO: 1818 - protein, 112 aa, Artificial Sequence
  Description of Artificial Sequence: Synthetic polypeptide
  Synthetic Construct
DVVMTQSPDSLAVSLGERATINCRSSQSLVHSNQYTYLHWYQQKPGQSPKLLIYKVSNRFSGVPDRFSGSGSGTDFTLTISSLQAEDVAVYYCSQSTRVPYTFGGGTKVEIK

SEQ ID NO: 1819 - protein, 112 aa, Artificial Sequence
  Description of Artificial Sequence: Synthetic polypeptide
  Synthetic Construct
DVVMTQSPDSLAVSLGERATINCRSSQSLVHSNRYTYLHWYQQKPGQSPKLLIYKVSNRFSGVPDRFSGSGSGTDFTLKISRVEAEDVGVYYCSQSTRVPYTFGQGTKLEIK

SEQ ID NO: 1820 - protein, 112 aa, Artificial Sequence
  Description of Artificial Sequence: Synthetic polypeptide
  Synthetic Construct
GVVMTQTPLSLSVTPGQPASISCRSSQSLVHSNRYTYLHWYLQKPGQSPQLLIYKVSNRRSGVPDRFSGSGSGTDFTLKISRVEAEDVGVYYCSQSTRVPYTFGQGTKLEIK

SEQ ID NO: 1821 - protein, 112 aa, Artificial Sequence; identical to SEQ ID NO: 1663
  Description of Artificial Sequence: Synthetic polypeptide
  Synthetic Construct

SEQ ID NO: 1822 - protein, 112 aa, Artificial Sequence
  Description of Artificial Sequence: Synthetic polypeptide
  Synthetic Construct
DVVMTQTPLSLSVTPGQPASISCRSSQSLVHSNGYTYLHWYLQKPGQSPQLLIYKVSNRFSGVPDRFSGSGSGTDFTLKISRVEAEDLGVYFCSQSTRVPYTFGQGTKLEIK

SEQ ID NO: 1823 - protein, 112 aa, Artificial Sequence
  Description of Artificial Sequence: Synthetic polypeptide
  Synthetic Construct
DIVMTQSPLSLPVTPGEPASISCRSSQSLVHSNGYTYLHWYLQKPGQSPQLLIYKVSNRFSGVPDRFSGSGSGTDFTLKISRVEAEDVGVYYCSQSTRVPYTFGGGTKVEIK

SEQ ID NO: 1824 - protein, 112 aa, Artificial Sequence
  Description of Artificial Sequence: Synthetic polypeptide
  Synthetic Construct
DVQMTQSPSSLSASVGDRVTITCRSSQSLVHSNGYTYLHWYQQKPGKSPKLLIYKVSNRFSGVPSRFSGSGSGTDFTLTISSLQPEDFATYYCSQSTRVPYTFGGGTKVEIK

SEQ ID NO: 1825 - protein, 112 aa, Artificial Sequence
  Description of Artificial Sequence: Synthetic polypeptide
  Synthetic Construct
GVVMTQTPLSLSVTPGQPASISCRTSQSLVHSNQYTYLHWYLQKPGQSPQLLIYKVSNRVSGVPDRFSGSGSGTDFTLKISRVEAEDVGVYYCSQSTRVPYTFGQGTKLEIK

SEQ ID NO: 1826 - protein, 123 aa, Artificial Sequence; identical to SEQ ID NO: 1341
  Description of Artificial Sequence: Synthetic polypeptide
  Synthetic Construct

SEQ ID NO: 1827 - protein, 112 aa, Artificial Sequence; identical to SEQ ID NO: 1670
  Description of Artificial Sequence: Synthetic polypeptide
  Synthetic Construct

SEQ ID NO: 1828 - protein, 9 aa, Artificial Sequence
  Description of Artificial Sequence: Synthetic peptide
  Synthetic Construct
  MOD_RES (4)..(4): Ser or Trp
  MOD_RES (5)..(5): Ser, Leu, or Arg
  MOD_RES (6)..(6): Ser, Asp, His, Gln, or Glu
YAFXXXWMN

SEQ ID NO: 1829 - protein, 17 aa, Artificial Sequence
  Description of Artificial Sequence: Synthetic peptide
  Synthetic Construct
  MOD_RES (6)..(6): Asp, Gly, Glu, Gln, or Val
  MOD_RES (8)..(8): Asp or Gln
  MOD_RES (13)..(13): Gln, Arg, His, Trp, Tyr, or Gly
  MOD_RES (15)..(15): Phe, Arg, or Trp
  MOD_RES (16)..(16): Gln, Arg, Lys, or His
RIYPGXGXTNYAXKXXG

SEQ ID NO: 1830 - protein, 16 aa, Artificial Sequence
  Description of Artificial Sequence: Synthetic peptide
  Synthetic Construct
  MOD_RES (7)..(7): Gln or Lys
  MOD_RES (10)..(10): Glu, Ser, or Ala
  MOD_RES (14)..(14): Met or His
ARLLRNXPGXSYAXDY

SEQ ID NO: 1831 - protein, 9 aa, Artificial Sequence
  Description of Artificial Sequence: Synthetic peptide
  Synthetic Construct
YAFSSSWMN

SEQ ID NO: 1832 - protein, 17 aa, Artificial Sequence
  Description of Artificial Sequence: Synthetic peptide
  Synthetic Construct
RIYPGDGDTNYAQKFQG

SEQ ID NO: 1833 - protein, 16 aa, Artificial Sequence
  Description of Artificial Sequence: Synthetic peptide
  Synthetic Construct
ARLLRNQPGESYAMDY

SEQ ID NO: 1834 - protein, 16 aa, Artificial Sequence
  Description of Artificial Sequence: Synthetic peptide
  Synthetic Construct
  MOD_RES (2)..(2): Ser or Thr
  MOD_RES (4)..(4): Gln, Arg, or Ser
  MOD_RES (7)..(7): Val or Ile
  MOD_RES (11)..(11): Gly, Arg, Trp, Gln, or Ala
RXSXSLXHSNXYTYLH

SEQ ID NO: 1835 - protein, 7 aa, Artificial Sequence
  Description of Artificial Sequence: Synthetic peptide
  Synthetic Construct
  MOD_RES (6)..(6): Phe, Arg, Val, or Lys
KVSNRXS

SEQ ID NO: 1836 - protein, 9 aa, Artificial Sequence
  Description of Artificial Sequence: Synthetic peptide
  Synthetic Construct
SQSTRVPYT

SEQ ID NO: 1837 - protein, 16 aa, Artificial Sequence
  Description of Artificial Sequence: Synthetic peptide
  Synthetic Construct
RSSQSLVHSNGYTYLH

SEQ ID NO: 1838 - protein, 7 aa, Artificial Sequence
  Description of Artificial Sequence: Synthetic peptide
  Synthetic Construct
KVSNRFS

SEQ ID NO: 1839 - protein, 9 aa, Artificial Sequence
  Description of Artificial Sequence: Synthetic peptide
  Synthetic Construct
YAFSSQWMN

SEQ ID NO: 1840 - protein, 17 aa, Artificial Sequence
  Description of Artificial Sequence: Synthetic peptide
  Synthetic Construct
RIYPGGGDTNYARKFQG

SEQ ID NO: 1841 - protein, 7 aa, Artificial Sequence
  Description of Artificial Sequence: Synthetic peptide
  Synthetic Construct
KVSNRRS

SEQ ID NO: 1842 - protein, 17 aa, Artificial Sequence
  Description of Artificial Sequence: Synthetic peptide
  Synthetic Construct
RIYPGGGDTNYAGKFQG

SEQ ID NO: 1843 - protein, 9 aa, Artificial Sequence
  Description of Artificial Sequence: Synthetic peptide
  Synthetic Construct
YAFSSDWMN

SEQ ID NO: 1844 - protein, 17 aa, Artificial Sequence
  Description of Artificial Sequence: Synthetic peptide
  Synthetic Construct
RIYPGEGDTNYARKFHG

SEQ ID NO: 1845 - protein, 16 aa, Artificial Sequence
  Description of Artificial Sequence: Synthetic peptide
  Synthetic Construct
ARLLRNKPGESYAMDY

SEQ ID NO: 1846 - protein, 16 aa, Artificial Sequence
  Description of Artificial Sequence: Synthetic peptide
  Synthetic Construct
RTSQSLVHSNAYTYLH

SEQ ID NO: 1847 - protein, 7 aa, Artificial Sequence
  Description of Artificial Sequence: Synthetic peptide
  Synthetic Construct
KVSNRVS

SEQ ID NO: 1848 - protein, 17 aa, Artificial Sequence
  Description of Artificial Sequence: Synthetic peptide
  Synthetic Construct
RIYPGEGDTNYARKFQG

SEQ ID NO: 1849 - protein, 16 aa, Artificial Sequence
  Description of Artificial Sequence: Synthetic peptide
  Synthetic Construct
RSSQSLVHSNQYTYLH

SEQ ID NO: 1850 - protein, 17 aa, Artificial Sequence
  Description of Artificial Sequence: Synthetic peptide
  Synthetic Construct
RIYPGEGDTNYAGKFQG

SEQ ID NO: 1851 - protein, 16 aa, Artificial Sequence
  Description of Artificial Sequence: Synthetic peptide
  Synthetic Construct
RSSQSLVHSNRYTYLH

SEQ ID NO: 1852 - protein, 110 aa, Homo sapiens; identical to SEQ ID NO: 207

SEQ ID NO: 1853 - protein, 330 aa, Homo sapiens [sequence omitted]

SEQ ID NO: 1854 - protein, 330 aa, Artificial Sequence
  Description of Artificial Sequence: Synthetic polypeptide
  Synthetic Construct
ASTKGPSVFPLAPSSKSTSGGTAALGCLVKDYFPEPVTVSWNSGALTSGVHTFPAVLQSSGLYSLSSVVTVPSSSLGTQTYICNVNHKPSNTKVDKKVEPKSCDKTHTCPPCPAPELLGGPSVFLFPPKPKDTLMISRTPEVTCVVVDVSHEDPEVKFNWYVDGVEVHNAKTKPREEQYNSTYRVVSVLTVLHQDWLNGKEYKCKVSNKALPAPIEKTISKAKGQPREPQVYTLPPSRDELTKNQVSLTCLVKGFYPSDIAVEWESNGQPENNYKTTPPVLDSDGSFFLYSKLTVDKSRWQQGNVFSCSVMHGALHNHYTQKSLSLSPGK

SEQ ID NO: 1855 - protein, 330 aa, Artificial Sequence
  Description of Artificial Sequence: Synthetic polypeptide
  Synthetic Construct
ASTKGPSVFPLAPSSKSTSGGTAALGCLVKDYFPEPVTVSWNSGALTSGVHTFPAVLQSSGLYSLSSVVTVPSSSLGTQTYICNVNHKPSNTKVDKKVEPKSCDKTHTCPPCPAPEAAGGPSVFLFPPKPKDTLMISRTPEVTCVVVDVSHEDPEVKFNWYVDGVEVHNAKTKPREEQYNSTYRVVSVLTVLHQDWLNGKEYKCKVSNKALPASIEKTISKAKGQPREPQVYTLPPSRDELTKNQVSLTCLVKGFYPSDIAVEWESNGQPENNYKTTPPVLDSDGSFFLYSKLTVDKSRWQQGNVFSCSVMHEALHNHYTQKSLSLSPGK

SEQ ID NO: 1856 - protein, 330 aa, Artificial Sequence
  Description of Artificial Sequence: Synthetic polypeptide
  Synthetic Construct
ASTKGPSVFPLAPSSKSTSGGTAALGCLVKDYFPEPVTVSWNSGALTSGVHTFPAVLQSSGLYSLSSVVTVPSSSLGTQTYICNVNHKPSNTKVDKKVEPKSCDKTHTCPPCPAPEAAGGPSVFLFPPKPKDTLMISRTPEVTCVVVDVSHEDPEVKFNWYVDGVEVHNAKTKPREEQYNSTYRVVSVLTVLHQDWLNGKEYKCKVSNKALPASIEKTISKAKGQPREPQVYTLPPSRDELTKNQVSLTCLVKGFYPSDIAVEWESNGQPENNYKTTPPVLDSDGSFFLYSKLTVDKSRWQQGNVFSCSVMHGALHNHYTQKSLSLSPGK

SEQ ID NO: 1857 - protein, 330 aa, Artificial Sequence
  Description of Artificial Sequence: Synthetic polypeptide
  Synthetic Construct
ASTKGPSVFPLAPSSKSTSGGTAALGCLVKDYFPEPVTVSWNSGALTSGVHTFPAVLQSSGLYSLSSVVTVPSSSLGTQTYICNVNHKPSNTKVDKKVEPKSCDKTHTCPPCPAPELLGGPSVFLFPPKPKDTLMISRTPEVTCVVVDVSHEDPEVKFNWYVDGVEVHNAKTKPREEQYNSTYRVVSVLTVLHQDWLNGKEYKCAVSNKALPAPIEKTISKAKGQPREPQVYTLPPSRDELTKNQVSLTCLVKGFYPSDIAVEWESNGQPENNYKTTPPVLDSDGSFFLYSKLTVDKSRWQQGNVFSCSVMHGALHNHYTQKSLSLSPGK

SEQ ID NO: 1858 - protein, 330 aa, Artificial Sequence
  Description of Artificial Sequence: Synthetic polypeptide
  Synthetic Construct
ASTKGPSVFPLAPSSKSTSGGTAALGCLVKDYFPEPVTVSWNSGALTSGVHTFPAVLQSSGLYSLSSVVTVPSSSLGTQTYICNVNHKPSNTKVDKKVEPKSCDKTHTCPPCPAPELLGGPSVFLFPPKPKDTLMISRTPEVTCVVVDVSHEDPEVKFNWYVDGVEVHNAKTKPREEQYNSTYRVVSVLTVLHQDWLNGKEYKCKVSNKALPASIEKTISKAKGQPREPQVYTLPPSRDELTKNQVSLTCLVKGFYPSDIAVEWESNGQPENNYKTTPPVLDSDGSFFLYSKLTVDKSRWQQGNVFSCSVMHGALHNHYTQKSLSLSPGK

SEQ ID NO: 1859 - protein, 330 aa, Artificial Sequence
  Description of Artificial Sequence: Synthetic polypeptide
  Synthetic Construct
ASTKGPSVFPLAPSSKSTSGGTAALGCLVKDYFPEPVTVSWNSGALTSGVHTFPAVLQSSGLYSLSSVVTVPSSSLGTQTYICNVNHKPSNTKVDKKVEPKSCDKTHTCPPCPAPELLGGPSVFLFPPKPKDTLMISRTPEVTCVVVDVSHEDPEVKFNWYVDGVEVHNAKTKPREEQYNSTYRVVSVLTVLHQDWLNGKEYKCKVSNKALPSSIEKTISKAKGQPREPQVYTLPPSRDELTKNQVSLTCLVKGFYPSDIAVEWESNGQPENNYKTTPPVLDSDGSFFLYSKLTVDKSRWQQGNVFSCSVMHGALHNHYTQKSLSLSPGK

SEQ ID NO: 1860 - protein, 330 aa, Artificial Sequence
  Description of Artificial Sequence: Synthetic polypeptide
  Synthetic Construct
ASTKGPSVFPLAPSSKSTSGGTAALGCLVKDYFPEPVTVSWNSGALTSGVHTFPAVLQSSGLYSLSSVVTVPSSSLGTQTYICNVNHKPSNTKVDKKVEPKSCDKTHTCPPCPAPELLGGPSVFLFPPKPKDTLMISRTPEVTCVVVDVSHEDPEVKFNWYVDGVEVHNAKTKPREEQYNSTYRVVSVLTVLHQDWLNGKEYKCAVSNKALPASIEKTISKAKGQPREPQVYTLPPSRDELTKNQVSLTCLVKGFYPSDIAVEWESNGQPENNYKTTPPVLDSDGSFFLYSKLTVDKSRWQQGNVFSCSVMHGALHNHYTQKSLSLSPGK

SEQ ID NO: 1861 - protein, 326 aa, Homo sapiens; identical to SEQ ID NO: 204

SEQ ID NO: 1862 - protein, 326 aa, Artificial Sequence
  Description of Artificial Sequence: Synthetic polypeptide
  Synthetic Construct
ASTKGPSVFPLAPCSRSTSESTAALGCLVKDYFPEPVTVSWNSGALTSGVHTFPAVLQSSGLYSLSSVVTVPSSNFGTQTYTCNVDHKPSNTKVDKTVERKCCVECPPCPAPPVAGPSVFLFPPKPKDTLMISRTPEVTCVVVDVSHEDPEVQFNWYVDGVEVHNAKTKPREEQFNSTFRVVSVLTVVHQDWLNGKEYKCKVSNKGLPAPIEKTISKTKGQPREPQVYTLPPSREEMTKNQVSLTCLVKGFYPSDIAVEWESNGQPENNYKTTPPMLDSDGSFFLYSKLTVDKSRWQQGNVFSCSVMHGALHNHYTQKSLSLSPGK

SEQ ID NO: 1863 - protein, 326 aa, Artificial Sequence
  Description of Artificial Sequence: Synthetic polypeptide
  Synthetic Construct
ASTKGPSVFPLAPCSRSTSESTAALGCLVKDYFPEPVTVSWNSGALTSGVHTFPAVLQSSGLYSLSSVVTVPSSNFGTQTYTCNVDHKPSNTKVDKTVERKCCVECPPCPAPPVAGPSVFLFPPKPKDTLMISRTPEVTCVVVDVSHEDPEVQFNWYVDGVEVHNAKTKPREEQFNSTFRVVSVLTVVHQDWLNGKEYKCKVSNKGLPSSIEKTISKTKGQPREPQVYTLPPSREEMTKNQVSLTCLVKGFYPSDIAVEWESNGQPENNYKTTPPMLDSDGSFFLYSKLTVDKSRWQQGNVFSCSVMHGALHNHYTQKSLSLSPGK

SEQ ID NO: 1864 - protein, 9 aa, Artificial Sequence
  Description of Artificial Sequence: Synthetic peptide
  Synthetic Construct
YAFSLSWMN

SEQ ID NO: 1865 - protein, 9 aa, Artificial Sequence
  Description of Artificial Sequence: Synthetic peptide
  Synthetic Construct
YAFSRSWMN

SEQ ID NO: 1866 - protein, 9 aa, Artificial Sequence
  Description of Artificial Sequence: Synthetic peptide
  Synthetic Construct
YAFSSHWMN

SEQ ID NO: 1867 - protein, 9 aa, Artificial Sequence
  Description of Artificial Sequence: Synthetic peptide
  Synthetic Construct
YAFSSEWMN

SEQ ID NO: 1868 - protein, 9 aa, Artificial Sequence
  Description of Artificial Sequence: Synthetic peptide
  Synthetic Construct
YAFWSSWMN

SEQ ID NO: 1869 - protein, 17 aa, Artificial Sequence
  Description of Artificial Sequence: Synthetic peptide
  Synthetic Construct
RIYPGGGDTNYAQKFQG

SEQ ID NO: 1870 - protein, 17 aa, Artificial Sequence
  Description of Artificial Sequence: Synthetic peptide
  Synthetic Construct
RIYPGEGDTNYAQKFQG

SEQ ID NO: 1871 - protein, 17 aa, Artificial Sequence
  Description of Artificial Sequence: Synthetic peptide
  Synthetic Construct
RIYPGQGDTNYAQKFQG

SEQ ID NO: 1872 - protein, 17 aa, Artificial Sequence
  Description of Artificial Sequence: Synthetic peptide
  Synthetic Construct
RIYPGDGDTNYAQKFRG

SEQ ID NO: 1873 - protein, 17 aa, Artificial Sequence
  Description of Artificial Sequence: Synthetic peptide
  Synthetic Construct
RIYPGDGDTNYARKFQG

SEQ ID NO: 1874 - protein, 17 aa, Artificial Sequence
  Description of Artificial Sequence: Synthetic peptide
  Synthetic Construct
RIYPGDGDTNYAHKFQG

SEQ ID NO: 1875 - protein, 17 aa, Artificial Sequence
  Description of Artificial Sequence: Synthetic peptide
  Synthetic Construct
RIYPGDGDTNYAQKFKG

SEQ ID NO: 1876 - protein, 17 aa, Artificial Sequence
  Description of Artificial Sequence: Synthetic peptide
  Synthetic Construct
RIYPGDGDTNYAQKRQG

SEQ ID NO: 1877 - protein, 17 aa, Artificial Sequence
  Description of Artificial Sequence: Synthetic peptide
  Synthetic Construct
RIYPGDGDTNYAQKWQG

SEQ ID NO: 1878 - protein, 17 aa, Artificial Sequence
  Description of Artificial Sequence: Synthetic peptide
  Synthetic Construct
RIYPGDGDTNYAWKFQG

SEQ ID NO: 1879 - protein, 17 aa, Artificial Sequence
  Description of Artificial Sequence: Synthetic peptide
  Synthetic Construct
RIYPGDGDTNYAYKFQG

SEQ ID NO: 1880 - protein, 17 aa, Artificial Sequence
  Description of Artificial Sequence: Synthetic peptide
  Synthetic Construct
RIYPGDGQTNYAQKRQG

SEQ ID NO: 1881 - protein, 17 aa, Artificial Sequence
  Description of Artificial Sequence: Synthetic peptide
  Synthetic Construct
RIYPGGGDTNYAQKFRG

SEQ ID NO: 1882 - protein, 17 aa, Artificial Sequence
  Description of Artificial Sequence: Synthetic peptide
  Synthetic Construct
RIYPGGGDTNYAQKRQG

SEQ ID NO: 1883 - protein, 17 aa, Artificial Sequence
  Description of Artificial Sequence: Synthetic peptide
  Synthetic Construct
RIYPGVGDTNYAQKFQG

SEQ ID NO: 1884 - protein, 17 aa, Artificial Sequence
  Description of Artificial Sequence: Synthetic peptide
  Synthetic Construct
RIYPGEGDTNYAQKFRG

SEQ ID NO: 1885 - protein, 17 aa, Artificial Sequence
  Description of Artificial Sequence: Synthetic peptide
  Synthetic Construct
RIYPGGGDTNYARKFRG

SEQ ID NO: 1886 - protein, 17 aa, Artificial Sequence
  Description of Artificial Sequence: Synthetic peptide
  Synthetic Construct
RIYPGEGDTNYAQKFHG

SEQ ID NO: 1887 - protein, 17 aa, Artificial Sequence
  Description of Artificial Sequence: Synthetic peptide
  Synthetic Construct
RIYPGEGQTNYAQKRQG

SEQ ID NO: 1888 - protein, 16 aa, Artificial Sequence
  Description of Artificial Sequence: Synthetic peptide
  Synthetic Construct
ARLLRNQPGSSYAMDY

SEQ ID NO: 1889 - protein, 16 aa, Artificial Sequence
  Description of Artificial Sequence: Synthetic peptide
  Synthetic Construct
ARLLRNQPGASYAMDY

SEQ ID NO: 1890 - protein, 16 aa, Artificial Sequence
  Description of Artificial Sequence: Synthetic peptide
  Synthetic Construct
ARLLRNQPGESYAHDY

SEQ ID NO: 1891 - protein, 16 aa, Artificial Sequence
  Description of Artificial Sequence: Synthetic peptide
  Synthetic Construct
RSSQSLVHSNWYTYLH

SEQ ID NO: 1892 - protein, 16 aa, Artificial Sequence
  Description of Artificial Sequence: Synthetic peptide
  Synthetic Construct
RSSQSLIHSNGYTYLH

SEQ ID NO: 1893 - protein, 16 aa, Artificial Sequence
  Description of Artificial Sequence: Synthetic peptide
  Synthetic Construct
RTSQSLVHSNGYTYLH

SEQ ID NO: 1894 - protein, 16 aa, Artificial Sequence
  Description of Artificial Sequence: Synthetic peptide
  Synthetic Construct
RSSRSLVHSNGYTYLH

SEQ ID NO: 1895 - protein, 16 aa, Artificial Sequence
  Description of Artificial Sequence: Synthetic peptide
  Synthetic Construct
RSSSSLVHSNGYTYLH

SEQ ID NO: 1896 - protein, 16 aa, Artificial Sequence
  Description of Artificial Sequence: Synthetic peptide
  Synthetic Construct
RSSRSLVHSNRYTYLH

SEQ ID NO: 1897 - protein, 16 aa, Artificial Sequence
  Description of Artificial Sequence: Synthetic peptide
  Synthetic Construct
RSSRSLVHSNQYTYLH

SEQ ID NO: 1898 - protein, 16 aa, Artificial Sequence
  Description of Artificial Sequence: Synthetic peptide
  Synthetic Construct
RTSRSLVHSNRYTYLH

SEQ ID NO: 1899 - protein, 16 aa, Artificial Sequence
  Description of Artificial Sequence: Synthetic peptide
  Synthetic Construct
RTSQSLVHSNQYTYLH

SEQ ID NO: 1900 - protein, 7 aa, Artificial Sequence
  Description of Artificial Sequence: Synthetic peptide
  Synthetic Construct
KVSNRKS

SEQ ID NO: 1901 - protein, 5 aa, Artificial Sequence
  Description of Artificial Sequence: Synthetic peptide
  Synthetic Construct
SQWMN

SEQ ID NO: 1902 - protein, 14 aa, Artificial Sequence
  Description of Artificial Sequence: Synthetic peptide
  Synthetic Construct
LLRNQPGESYAMDY

SEQ ID NO: 1903 - protein, 5 aa, Artificial Sequence
  Description of Artificial Sequence: Synthetic peptide
  Synthetic Construct
SDWMN

SEQ ID NO: 1904 - protein, 14 aa, Artificial Sequence
  Description of Artificial Sequence: Synthetic peptide
  Synthetic Construct
LLRNKPGESYAMDY

SEQ ID NO: 1905 - protein, 453 aa, Artificial Sequence
  Description of Artificial Sequence: Synthetic polypeptide
  Synthetic Construct
QVQLVQSGAEVKKPGASVKVSCKASGYAFSSQWMNWVRQAPGQRLEWIGRIYPGGGDTNYAGKFQGRVTITADTSASTAYMELSSLRSEDTAVYYCARLLRNQPGESYAMDYWGQGTLVTVSSASTKGPSVFPLAPSSKSTSGGTAALGCLVKDYFPEPVTVSWNSGALTSGVHTFPAVLQSSGLYSLSSVVTVPSSSLGTQTYICNVNHKPSNTKVDKKVEPKSCDKTHTCPPCPAPELLGGPSVFLFPPKPKDTLMISRTPEVTCVVVDVSHEDPEVKFNWYVDGVEVHNAKTKPREEQYNSTYRVVSVLTVLHQDWLNGKEYKCKVSNKALPAPIEKTISKAKGQPREPQVYTLPPSRDELTKNQVSLTCLVKGFYPSDIAVEWESNGQPENNYKTTPPVLDSDGSFFLYSKLTVDKSRWQQGNVFSCSVMHEALHNHYTQKSLSLSPGK

SEQ ID NO: 1906 - protein, 452 aa, Artificial Sequence
  Description of Artificial Sequence: Synthetic polypeptide
  Synthetic Construct
QVQLVQSGAEVKKPGASVKVSCKASGYAFSSQWMNWVRQAPGQRLEWIGRIYPGGGDTNYAGKFQGRVTITADTSASTAYMELSSLRSEDTAVYYCARLLRNQPGESYAMDYWGQGTLVTVSSASTKGPSVFPLAPSSKSTSGGTAALGCLVKDYFPEPVTVSWNSGALTSGVHTFPAVLQSSGLYSLSSVVTVPSSSLGTQTYICNVNHKPSNTKVDKKVEPKSCDKTHTCPPCPAPELLGGPSVFLFPPKPKDTLMISRTPEVTCVVVDVSHEDPEVKFNWYVDGVEVHNAKTKPREEQYNSTYRVVSVLTVLHQDWLNGKEYKCKVSNKALPAPIEKTISKAKGQPREPQVYTLPPSRDELTKNQVSLTCLVKGFYPSDIAVEWESNGQPENNYKTTPPVLDSDGSFFLYSKLTVDKSRWQQGNVFSCSVMHEALHNHYTQKSLSLSPG

SEQ ID NO: 1907 - protein, 453 aa, Artificial Sequence
  Description of Artificial Sequence: Synthetic polypeptide
  Synthetic Construct
QVQLVQSGAEVKKPGASVKVSCKASGYAFSSQWMNWVRQAPGQRLEWIGRIYPGGGDTNYAGKFQGRVTITADTSASTAYMELSSLRSEDTAVYYCARLLRNQPGESYAMDYWGQGTLVTVSSASTKGPSVFPLAPSSKSTSGGTAALGCLVKDYFPEPVTVSWNSGALTSGVHTFPAVLQSSGLYSLSSVVTVPSSSLGTQTYICNVNHKPSNTKVDKKVEPKSCDKTHTCPPCPAPELLGGPSVFLFPPKPKDTLMISRTPEVTCVVVDVSHEDPEVKFNWYVDGVEVHNAKTKPREEQYNSTYRVVSVLTVLHQDWLNGKEYKCKVSNKALPASIEKTISKAKGQPREPQVYTLPPSRDELTKNQVSLTCLVKGFYPSDIAVEWESNGQPENNYKTTPPVLDSDGSFFLYSKLTVDKSRWQQGNVFSCSVMHGALHNHYTQKSLSLSPGK

SEQ ID NO: 1908 - protein, 452 aa, Artificial Sequence
  Description of Artificial Sequence: Synthetic polypeptide
  Synthetic Construct
QVQLVQSGAEVKKPGASVKVSCKASGYAFSSQWMNWVRQAPGQRLEWIGRIYPGGGDTNYAGKFQGRVTITADTSASTAYMELSSLRSEDTAVYYCARLLRNQPGESYAMDYWGQGTLVTVSSASTKGPSVFPLAPSSKSTSGGTAALGCLVKDYFPEPVTVSWNSGALTSGVHTFPAVLQSSGLYSLSSVVTVPSSSLGTQTYICNVNHKPSNTKVDKKVEPKSCDKTHTCPPCPAPELLGGPSVFLFPPKPKDTLMISRTPEVTCVVVDVSHEDPEVKFNWYVDGVEVHNAKTKPREEQYNSTYRVVSVLTVLHQDWLNGKEYKCKVSNKALPASIEKTISKAKGQPREPQVYTLPPSRDELTKNQVSLTCLVKGFYPSDIAVEWESNGQPENNYKTTPPVLDSDGSFFLYSKLTVDKSRWQQGNVFSCSVMHGALHNHYTQKSLSLSPG

SEQ ID NO: 1909 - protein, 453 aa, Artificial Sequence
  Description of Artificial Sequence: Synthetic polypeptide
  Synthetic Construct
QVQLVQSGAEVKKPGSSVKVSCKASGYAFSSDWMNWVRQAPGQGLEWMGRIYPGEGDTNYARKFHGRVTITADESTSTAYMELSSLRSEDTAVYYCARLLRNKPGESYAMDYWGQGTLVTVSSASTKGPSVFPLAPSSKSTSGGTAALGCLVKDYFPEPVTVSWNSGALTSGVHTFPAVLQSSGLYSLSSVVTVPSSSLGTQTYICNVNHKPSNTKVDKKVEPKSCDKTHTCPPCPAPELLGGPSVFLFPPKPKDTLMISRTPEVTCVVVDVSHEDPEVKFNWYVDGVEVHNAKTKPREEQYNSTYRVVSVLTVLHQDWLNGKEYKCKVSNKALPAPIEKTISKAKGQPREPQVYTLPPSRDELTKNQVSLTCLVKGFYPSDIAVEWESNGQPENNYKTTPPVLDSDGSFFLYSKLTVDKSRWQQGNVFSCSVMHEALHNHYTQKSLSLSPGK

SEQ ID NO: 1910 - protein, 452 aa, Artificial Sequence
  Description of Artificial Sequence: Synthetic polypeptide
  Synthetic Construct
QVQLVQSGAEVKKPGSSVKVSCKASGYAFSSDWMNWVRQAPGQGLEWMGRIYPGEGDTNYARKFHGRVTITADESTSTAYMELSSLRSEDTAVYYCARLLRNKPGESYAMDYWGQGTLVTVSSASTKGPSVFPLAPSSKSTSGGTAALGCLVKDYFPEPVTVSWNSGALTSGVHTFPAVLQSSGLYSLSSVVTVPSSSLGTQTYICNVNHKPSNTKVDKKVEPKSCDKTHTCPPCPAPELLGGPSVFLFPPKPKDTLMISRTPEVTCVVVDVSHEDPEVKFNWYVDGVEVHNAKTKPREEQYNSTYRVVSVLTVLHQDWLNGKEYKCKVSNKALPAPIEKTISKAKGQPREPQVYTLPPSRDELTKNQVSLTCLVKGFYPSDIAVEWESNGQPENNYKTTPPVLDSDGSFFLYSKLTVDKSRWQQGNVFSCSVMHEALHNHYTQKSLSLSPG

SEQ ID NO: 1911 - protein, 453 aa, Artificial Sequence
  Description of Artificial Sequence: Synthetic polypeptide
  Synthetic Construct
QVQLVQSGAEVKKPGSSVKVSCKASGYAFSSDWMNWVRQAPGQGLEWMGRIYPGEGDTNYARKFHGRVTITADESTSTAYMELSSLRSEDTAVYYCARLLRNKPGESYAMDYWGQGTLVTVSSASTKGPSVFPLAPSSKSTSGGTAALGCLVKDYFPEPVTVSWNSGALTSGVHTFPAVLQSSGLYSLSSVVTVPSSSLGTQTYICNVNHKPSNTKVDKKVEPKSCDKTHTCPPCPAPELLGGPSVFLFPPKPKDTLMISRTPEVTCVVVDVSHEDPEVKFNWYVDGVEVHNAKTKPREEQYNSTYRVVSVLTVLHQDWLNGKEYKCKVSNKALPASIEKTISKAKGQPREPQVYTLPPSRDELTKNQVSLTCLVKGFYPSDIAVEWESNGQPENNYKTTPPVLDSDGSFFLYSKLTVDKSRWQQGNVFSCSVMHGALHNHYTQKSLSLSPGK

SEQ ID NO: 1912 - protein, 452 aa, Artificial Sequence
  Description of Artificial Sequence: Synthetic polypeptide
  Synthetic Construct
QVQLVQSGAEVKKPGSSVKVSCKASGYAFSSDWMNWVRQAPGQGLEWMGRIYPGEGDTNYARKFHGRVTITADESTSTAYMELSSLRSEDTAVYYCARLLRNKPGESYAMDYWGQGTLVTVSSASTKGPSVFPLAPSSKSTSGGTAALGCLVKDYFPEPVTVSWNSGALTSGVHTFPAVLQSSGLYSLSSVVTVPSSSLGTQTYICNVNHKPSNTKVDKKVEPKSCDKTHTCPPCPAPELLGGPSVFLFPPKPKDTLMISRTPEVTCVVVDVSHEDPEVKFNWYVDGVEVHNAKTKPREEQYNSTYRVVSVLTVLHQDWLNGKEYKCKVSNKALPASIEKTISKAKGQPREPQVYTLPPSRDELTKNQVSLTCLVKGFYPSDIAVEWESNGQPENNYKTTPPVLDSDGSFFLYSKLTVDKSRWQQGNVFSCSVMHGALHNHYTQKSLSLSPG

SEQ ID NO: 1913 - protein, 453 aa, Artificial Sequence
  Description of Artificial Sequence: Synthetic polypeptide
  Synthetic Construct
QVQLVQSGAEVKKPGSSVKVSCKASGYAFSSQWMNWVRQAPGQGLEWMGRIYPGEGDTNYARKFQGRVTITADESTSTAYMELSSLRSEDTAVYYCARLLRNQPGESYAMDYWGQGTLVTVSSASTKGPSVFPLAPSSKSTSGGTAALGCLVKDYFPEPVTVSWNSGALTSGVHTFPAVLQSSGLYSLSSVVTVPSSSLGTQTYICNVNHKPSNTKVDKKVEPKSCDKTHTCPPCPAPELLGGPSVFLFPPKPKDTLMISRTPEVTCVVVDVSHEDPEVKFNWYVDGVEVHNAKTKPREEQYNSTYRVVSVLTVLHQDWLNGKEYKCKVSNKALPAPIEKTISKAKGQPREPQVYTLPPSRDELTKNQVSLTCLVKGFYPSDIAVEWESNGQPENNYKTTPPVLDSDGSFFLYSKLTVDKSRWQQGNVFSCSVMHEALHNHYTQKSLSLSPGK

SEQ ID NO: 1914 - protein, 452 aa, Artificial Sequence
  Description of Artificial Sequence: Synthetic polypeptide
  Synthetic Construct
QVQLVQSGAEVKKPGSSVKVSCKASGYAFSSQWMNWVRQAPGQGLEWMGRIYPGEGDTNYARKFQGRVTITADESTSTAYMELSSLRSEDTAVYYCARLLRNQPGESYAMDYWGQGTLVTVSSASTKGPSVFPLAPSSKSTSGGTAALGCLVKDYFPEPVTVSWNSGALTSGVHTFPAVLQSSGLYSLSSVVTVPSSSLGTQTYICNVNHKPSNTKVDKKVEPKSCDKTHTCPPCPAPELLGGPSVFLFPPKPKDTLMISRTPEVTCVVVDVSHEDPEVKFNWYVDGVEVHNAKTKPREEQYNSTYRVVSVLTVLHQDWLNGKEYKCKVSNKALPAPIEKTISKAKGQPREPQVYTLPPSRDELTKNQVSLTCLVKGFYPSDIAVEWESNGQPENNYKTTPPVLDSDGSFFLYSKLTVDKSRWQQGNVFSCSVMHEALHNHYTQKSLSLSPG

SEQ ID NO: 1915 - protein, 453 aa, Artificial Sequence
  Description of Artificial Sequence: Synthetic polypeptide
  Synthetic Construct
QVQLVQSGAEVKKPGSSVKVSCKASGYAFSSHWMNWVRQAPGQGLEWMGRIYPGGGDTNYAQKFRGRVTITADESTSTAYMELSSLRSEDTAVYYCARLLRNQPGASYAMDYWGQGTLVTVSSASTKGPSVFPLAPSSKSTSGGTAALGCLVKDYFPEPVTVSWNSGALTSGVHTFPAVLQSSGLYSLSSVVTVPSSSLGTQTYICNVNHKPSNTKVDKKVEPKSCDKTHTCPPCPAPELLGGPSVFLFPPKPKDTLMISRTPEVTCVVVDVSHEDPEVKFNWYVDGVEVHNAKTKPREEQYNSTYRVVSVLTVLHQDWLNGKEYKCKVSNKALPAPIEKTISKAKGQPREPQVYTLPPSRDELTKNQVSLTCLVKGFYPSDIAVEWESNGQPENNYKTTPPVLDSDGSFFLYSKLTVDKSRWQQGNVFSCSVMHEALHNHYTQKSLSLSPGK

SEQ ID NO: 1916 - protein, 452 aa, Artificial Sequence
  Description of Artificial Sequence: Synthetic polypeptide
  Synthetic Construct
QVQLVQSGAEVKKPGSSVKVSCKASGYAFSSHWMNWVRQAPGQGLEWMGRIYPGGGDTNYAQKFRGRVTITADESTSTAYMELSSLRSEDTAVYYCARLLRNQPGASYAMDYWGQGTLVTVSSASTKGPSVFPLAPSSKSTSGGTAALGCLVKDYFPEPVTVSWNSGALTSGVHTFPAVLQSSGLYSLSSVVTVPSSSLGTQTYICNVNHKPSNTKVDKKVEPKSCDKTHTCPPCPAPELLGGPSVFLFPPKPKDTLMISRTPEVTCVVVDVSHEDPEVKFNWYVDGVEVHNAKTKPREEQYNSTYRVVSVLTVLHQDWLNGKEYKCKVSNKALPAPIEKTISKAKGQPREPQVYTLPPSRDELTKNQVSLTCLVKGFYPSDIAVEWESNGQPENNYKTTPPVLDSDGSFFLYSKLTVDKSRWQQGNVFSCSVMHEALHNHYTQKSLSLSPG

SEQ ID NO: 1917 - protein, 453 aa, Artificial Sequence
  Description of Artificial Sequence: Synthetic polypeptide
  Synthetic Construct
QVQLVQSGAEVKKPGSSVKVSCKASGYAFSSHWMNWVRQAPGQGLEWMGRIYPGGGDTNYARKFRGRVTITADESTSTAYMELSSLRSEDTAVYYCARLLRNQPGASYAMDYWGQGTLVTVSSASTKGPSVFPLAPSSKSTSGGTAALGCLVKDYFPEPVTVSWNSGALTSGVHTFPAVLQSSGLYSLSSVVTVPSSSLGTQTYICNVNHKPSNTKVDKKVEPKSCDKTHTCPPCPAPELLGGPSVFLFPPKPKDTLMISRTPEVTCVVVDVSHEDPEVKFNWYVDGVEVHNAKTKPREEQYNSTYRVVSVLTVLHQDWLNGKEYKCKVSNKALPAPIEKTISKAKGQPREPQVYTLPPSRDELTKNQVSLTCLVKGFYPSDIAVEWESNGQPENNYKTTPPVLDSDGSFFLYSKLTVDKSRWQQGNVFSCSVMHEALHNHYTQKSLSLSPGK

SEQ ID NO: 1918 - protein, 452 aa, Artificial Sequence
  Description of Artificial Sequence: Synthetic polypeptide
  Synthetic Construct
QVQLVQSGAEVKKPGSSVKVSCKASGYAFSSHWMNWVRQAPGQGLEWMGRIYPGGGDTNYARKFRGRVTITADESTSTAYMELSSLRSEDTAVYYCARLLRNQPGASYAMDYWGQGTLVTVSSASTKGPSVFPLAPSSKSTSGGTAALGCLVKDYFPEPVTVSWNSGALTSGVHTFPAVLQSSGLYSLSSVVTVPSSSLGTQTYICNVNHKPSNTKVDKKVEPKSCDKTHTCPPCPAPELLGGPSVFLFPPKPKDTLMISRTPEVTCVVVDVSHEDPEVKFNWYVDGVEVHNAKTKPREEQYNSTYRVVSVLTVLHQDWLNGKEYKCKVSNKALPAPIEKTISKAKGQPREPQVYTLPPSRDELTKNQVSLTCLVKGFYPSDIAVEWESNGQPENNYKTTPPVLDSDGSFFLYSKLTVDKSRWQQGNVFSCSVMHEALHNHYTQKSLSLSPG

SEQ ID NO: 1919 - protein, 453 aa, Artificial Sequence
  Description of Artificial Sequence: Synthetic polypeptide
  Synthetic Construct
QVQLVQSGAEVKKPGSSVKVSCKASGYAFSSHWMNWVRQAPGQGLEWMGRIYPGEGDTNYAQKFRGRVTITADESTSTAYMELSSLRSEDTAVYYCARLLRNQPGASYAMDYWGQGTLVTVSSASTKGPSVFPLAPSSKSTSGGTAALGCLVKDYFPEPVTVSWNSGALTSGVHTFPAVLQSSGLYSLSSVVTVPSSSLGTQTYICNVNHKPSNTKVDKKVEPKSCDKTHTCPPCPAPELLGGPSVFLFPPKPKDTLMISRTPEVTCVVVDVSHEDPEVKFNWYVDGVEVHNAKTKPREEQYNSTYRVVSVLTVLHQDWLNGKEYKCKVSNKALPAPIEKTISKAKGQPREPQVYTLPPSRDELTKNQVSLTCLVKGFYPSDIAVEWESNGQPENNYKTTPPVLDSDGSFFLYSKLTVDKSRWQQGNVFSCSVMHEALHNHYTQKSLSLSPGK

SEQ ID NO: 1920 - protein, 452 aa, Artificial Sequence
  Description of Artificial Sequence: Synthetic polypeptide
  Synthetic Construct
QVQLVQSGAEVKKPGSSVKVSCKASGYAFSSHWMNWVRQAPGQGLEWMGRIYPGEGDTNYAQKFRGRVTITADESTSTAYMELSSLRSEDTAVYYCARLLRNQPGASYAMDYWGQGTLVTVSSASTKGPSVFPLAPSSKSTSGGTAALGCLVKDYFPEPVTVSWNSGALTSGVHTFPAVLQSSGLYSLSSVVTVPSSSLGTQTYICNVNHKPSNTKVDKKVEPKSCDKTHTCPPCPAPELLGGPSVFLFPPKPKDTLMISRTPEVTCVVVDVSHEDPEVKFNWYVDGVEVHNAKTKPREEQYNSTYRVVSVLTVLHQDWLNGKEYKCKVSNKALPAPIEKTISKAKGQPREPQVYTLPPSRDELTKNQVSLTCLVKGFYPSDIAVEWESNGQPENNYKTTPPVLDSDGSFFLYSKLTVDKSRWQQGNVFSCSVMHEALHNHYTQKSLSLSPG

SEQ ID NO: 1921 - protein, 219 aa, Artificial Sequence
  Description of Artificial Sequence: Synthetic polypeptide
  Synthetic Construct
DVVMTQSPDSLAVSLGERATINCRSSQSLVHSNRYTYLHWYQQKPGQSPKLLIYKVSNRFSGVPDRFSGSGSGTDFTLKISRVEAEDVGVYYCSQSTRVPYTFGQGTKLEIKRTVAAPSVFIFPPSDEQLKSGTASVVCLLNNFYPREAKVQWKVDNALQSGNSQESVTEQDSKDSTYSLSSTLTLSKADYEKHKVYACEVTHQGLSSPVTKSFNRGEC

SEQ ID NO: 1922 - protein, 219 aa, Artificial Sequence
  Description of Artificial Sequence: Synthetic polypeptide
  Synthetic Construct
DVVMTQTPLSLSVTPGQPASISCRTSQSLVHSNAYTYLHWYLQKPGQSPQLLIYKVSNRVSGVPDRFSGSGSGTDFTLKISRVEAEDVGVYYCSQSTRVPYTFGQGTKLEIKRTVAAPSVFIFPPSDEQLKSGTASVVCLLNNFYPREAKVQWKVDNALQSGNSQESVTEQDSKDSTYSLSSTLTLSKADYEKHKVYACEVTHQGLSSPVTKSFNRGEC

SEQ ID NO: 1923 - protein, 219 aa, Artificial Sequence
  Description of Artificial Sequence: Synthetic polypeptide
  Synthetic Construct
GVVMTQTPLSLSVTPGQPASISCRSSQSLVHSNQYTYLHWYLQKPGQSPQLLIYKVSNRRSGVPDRFSGSGSGTDFTLKISRVEAEDVGVYYCSQSTRVPYTFGQGTKLEIKRTVAAPSVFIFPPSDEQLKSGTASVVCLLNNFYPREAKVQWKVDNALQSGNSQESVTEQDSKDSTYSLSSTLTLSKADYEKHKVYACEVTHQGLSSPVTKSFNRGEC

SEQ ID NO: 1924 - protein, 219 aa, Artificial Sequence
  Description of Artificial Sequence: Synthetic polypeptide
  Synthetic Construct
GVVMTQTPLSLSVTPGQPASISCRSSRSLVHSNQYTYLHWYLQKPGQSPQLLIYKVSNRRSGVPDRFSGSGSGTDFTLKISRVEAEDVGVYYCSQSTRVPYTFGQGTKLEIKRTVAAPSVFIFPPSDEQLKSGTASVVCLLNNFYPREAKVQWKVDNALQSGNSQESVTEQDSKDSTYSLSSTLTLSKADYEKHKVYACEVTHQGLSSPVTKSFNRGEC

SEQ ID NO: 1925 - protein, 219 aa, Artificial Sequence
  Description of Artificial Sequence: Synthetic polypeptide
  Synthetic Construct
GVVMTQTPLSLSVTPGQPASISCRTSRSLVHSNRYTYLHWYLQKPGQSPQLLIYKVSNRRSGVPDRFSGSGSGTDFTLKISRVEAEDVGVYYCSQSTRVPYTFGQGTKLEIKRTVAAPSVFIFPPSDEQLKSGTASVVCLLNNFYPREAKVQWKVDNALQSGNSQESVTEQDSKDSTYSLSSTLTLSKADYEKHKVYACEVTHQGLSSPVTKSFNRGEC

SEQ ID NO: 1926 - protein, 219 aa, Homo sapiens
MEPLRLLILLFVTELSGAHNTTVFQGVAGQSLQVSCPYDSMKHWGRRKAWCRQLGEKGPCQRVVSTHNLWLLSFLRRWNGSTAITDDTLGGTLTITLRNLQPHDAGLYQCQSLHGSEADTLRKVLVEVLADPLDHRDAGDLWFPGESESFEDAHVEHSISRAERHVKEDDGRKSPGEVPPGTSPACILATWPPGLLVLLWQETTLPEHCFSWTLEAGTG

SEQ ID NO: 1927 - protein, 222 aa, Homo sapiens
MEPLRLLILLFVTELSGAHNTTVFQGVAGQSLQVSCPYDSMKHWGRRKAWCRQLGEKGPCQRVVSTHNLWLLSFLRRWNGSTAITDDTLGGTLTITLRNLQPHDAGLYQCQSLHGSEADTLRKVLVEVLADPLDHRDAGDLWFPGESESFEDAHVEHSISRPSQGSHLPSCLSKEPLGRRNPLPTHFHPSPPGLHLSHQDSSSQRPLGCSLAWTEARDTSTQ

SEQ ID NO: 1928 - protein, 227 aa, Mus musculus; identical to SEQ ID NO: 822

SEQ ID NO: 1929 - protein, 249 aa, Mus musculus
MGPLHQFLLLLITALSQALNTTVLQGMAGQSLRVSCTYDALKHWGRRKAWCRQLGEEGPCQRVVSTHGVWLLAFLKKRNGSTVIADDTLAGTVTITLKNLQAGDAGLYQCQSLRGREAEVLQKVLVEVLEDPLDDQDAGDLWVPEESSSFEGAQVEHSTSRQVSSCGSPLAYHLPPLSKESRDLLPTHLHSSPPGLRSPEQVSCSQHPLGCGQGQAEAGNTCGQRAGLWPRCWAPTSDPHWTRRYVREF

SEQ ID NO: 1930 - protein, 228 aa, Rattus norvegicus; identical to SEQ ID NO: 823

SEQ ID NO: 1931 - protein, 10 aa, Artificial Sequence
  Description of Artificial Sequence: Synthetic peptide
  Peptide for immunization for generating an antibody against human TREM2
AHVEHSISRS

SEQ ID NO: 1932 - protein, 7 aa, Artificial Sequence
  Description of Artificial Sequence: Synthetic peptide
  Peptide for immunization for generating an antibod against human TREM2
EDAHVEH

SEQ ID NO: 1933 - protein, 6 aa, Artificial Sequence
  Description of Artificial Sequence: Synthetic peptide
  Peptide for immunization for generating an antibody against human TREM2
SISRSL

SEQ ID NO: 1934 - protein, 10 aa, Artificial Sequence
  Description of Artificial Sequence: Synthetic peptide
  Peptide for immunization for generating an antibody against murine TREM2
AQVEHSTSRN

SEQ ID NO: 1935 - protein, 7 aa, Artificial Sequence
  Description of Artificial Sequence: Synthetic peptide
  Peptide for immunization for generating an antibody against murine TREM2
EGAQVEH

SEQ ID NO: 1936 - protein, 6 aa, Artificial Sequence
  Description of Artificial Sequence: Synthetic peptide
  Peptide for immunization for generating an antibody against murine TREM2
STSRNQ

SEQ ID NO: 1937 - protein, 10 aa, Artificial Sequence
  Description of Artificial Sequence: Synthetic peptide
  Peptide for immunization for generating an antibody against rat TREM2
AQVEHSTSSQ

SEQ ID NO: 1938 - protein, 7 aa, Artificial Sequence
  Description of Artificial Sequence: Synthetic peptide
  Peptide for immunization for generating an antibody against rat TREM2
EGAQVEH

SEQ ID NO: 1939 - protein, 6 aa, Artificial Sequence
  Description of Artificial Sequence: Synthetic peptide
  Peptide for immunization for generating an antibody against rat TREM2
STSSQV

SEQ ID NO: 1940 - protein, 30 aa, Artificial Sequence
  Description of Artificial Sequence: Synthetic polypeptide
  Amino acid stretch within human TREM2, wherein the minimal cleavage site of ADAM10 can be predicted
GESESFEDAHVEHSISRSLLEGEIPFPPTS

SEQ ID NO: 1941 - protein, 171 aa, Artificial Sequence
  Description of Artificial Sequence: Synthetic polypeptide
  Ectodomain of murine TREM2
MGPLHQFLLLLITALSQALNTTVLQGMAGQSLRVSCTYDALKHWGRRKAWCRQLGEEGPCQRVVSTHGVWLLAFLKKRNGSTVIADDTLAGTVTITLKNLQAGDAGLYQCQSLRGREAEVLQKVLVEVLEDPLDDQDAGDLWVPEESSSFEGAQVEHSTSRNQETSFPPTS

SEQ ID NO: 1942 - protein, 35 aa, Artificial Sequence
  Description of Artificial Sequence: Synthetic polypeptide
  Intracellular domain of human TREM2
AAWHGQKPGTHPPSELDCGHDPGYQLQTLPGLRDT

SEQ ID NO: 1943 - protein, 35 aa, Artificial Sequence
  Description of Artificial Sequence: Synthetic polypeptide
  Intracellular domain of murine TREM2
VARGRQKPGTPVVRGLDCGQDAGHQLQILTGPGGT

SEQ ID NO: 1944 - protein, 11 aa, Artificial Sequence
  Description of Artificial Sequence: Synthetic peptide
  Peptide for immunization for generating an antibody against human TREM2
GESESFEDAHV

SEQ ID NO: 1945 - protein, 13 aa, Artificial Sequence
  Description of Artificial Sequence: Synthetic peptide
  Peptide for immunization for generating an antibody against murine TREM2
EHSTSRNQETSFP

SEQ ID NO: 1946 - protein, 122 aa, Artificial Sequence
  Description of Artificial Sequence: Synthetic polypeptide
  Clone 14D3 variable region of the heavy chain
EVKLLEFGGGLVQPGGSMRLSCAASGFTFTDFYMNWIRQPAGRAPEWLGLIRNKTKGYTTEYNRSVKGRFTISRDNTQNMLYLQMNSLRPEDTATYYCARIGVNNGGSLDYWGQGVMVTVSS

SEQ ID NO: 1947 - protein, 122 aa, Artificial Sequence
  Description of Artificial Sequence: Synthetic polypeptide
  Clone 14D8 variable region of the heavy chain
EVKLLESGGGLVQPGGSMRLSCAASGFTFTDFYMNWIRQPAGKAPEWLGLIRNKANGYTTVYNPSVKGRFTISRDNTQNMLYLQMNTLRGEDTATYYCARIGINNGGSLDYWGQGVMVTVSS

SEQ ID NO: 1948 - protein, 122 aa, Artificial Sequence
  Description of Artificial Sequence: Synthetic polypeptide
  Clone 7A12 variable region of the heavy chain
EVKLLESGGGLVQPGGSMRLSCAASGFTFTDFYMNWIRQPAGKAPEWLGLIRNKANGYTTQYNPSVKGRFTISRDNTQNMLYLQMNTLRGEDTATYYCARIGINNGGSLDYWGQGVMVTVSS

SEQ ID NO: 1949 - protein, 122 aa, Artificial Sequence
  Description of Artificial Sequence: Synthetic polypeptide
  Clone 8A11 variable region of the heavy chain
EVKLLESGGGLVQPGGSMRLSCAASGFTFTDFYMNWIRQPAGKAPEWLGLIRNKTKGYTTEYNTSVKGRFTISRDNTQNMLYLQMNSLRPEDTATYYCARIGVNNGGSLDYWGQGVMVTVSS

SEQ ID NO: 1950 - protein, 122 aa, Artificial Sequence; identical to SEQ ID NO: 1948
  Description of Artificial Sequence: Synthetic polypeptide
  Clone 21A3 variable region of the heavy chain

SEQ ID NO: 1951 - protein, 122 aa, Artificial Sequence
  Description of Artificial Sequence: Synthetic polypeptide
  Clone 10C3 variable region of the heavy chain
EVKLLESGGGLVQPGGSMRLSCAASGFTFTDFYMNWIRQPAGETPEWLGLIRNKTKGYTTEYNPSVKGRFTISRDNTQNMLYLQMNSLRPEDTATYYCARIGTNNGGSLDYWGQGVMVTVSS

SEQ ID NO: 1952 - protein, 122 aa, Artificial Sequence
  Description of Artificial Sequence: Synthetic polypeptide
  Clone 18F9 variable region of the heavy chain
EVKLLESGGGLVQPGGSMRLSCVVSGFTFTDFYMNWIRQAAGKAPEWLGLIRNKVNGYRTEYNPSVKGRFTISRDNIQNMLYLQMNTLRAEDTATYYCARIGINNGGSLDYWGQGVMVTVSS

SEQ ID NO: 1953 - protein, 122 aa, Artificial Sequence
  Description of Artificial Sequence: Synthetic polypeptide
  Clone 15C5 variable region of the heavy chain
EVKLLESGGGLVQPGGSMRLSCAASGFTFTDFYMNWIRQPAGKAPEWLGLIRNKAYGYTTEYNPSVKGRFTISRDNTQDMLYLQMNTLRAEDTATYYCARIGINYGGSLDYWGQGVMVTVSS

SEQ ID NO: 1954 - protein, 122 aa, Artificial Sequence
  Description of Artificial Sequence: Synthetic polypeptide
  Clone 1G6 variable region of the heavy chain
EVKLLESGGGLVQPGGSLRLSCVASGFTFTDFYMNWIRQPAGKAPEWLGLIRNKANGFTTEYNPSVKGRFTISRDNTQHMLYLQMNTLRAEDTATYYCARIGINNGGSLDYWGQGVMVTVSS

SEQ ID NO: 1955 - protein, 121 aa, Artificial Sequence
  Description of Artificial Sequence: Synthetic polypeptide
  Consensus sequence
EVKLLESGGGLVQPGGSMRLSCAASGFTFTDFYMNWIRQPAGKAPEWLGLIRNKANGYTTEYNPSVKGRFTISRDNTQNMLYLQMNTLREDTATYYCARIGINNGGSLDYWGQGVMVTVSS

SEQ ID NO: 1956 - protein, 113 aa, Artificial Sequence
  Description of Artificial Sequence: Synthetic polypeptide
  Clone 14D3 variable region of the light chain
DILIIQSPASLTVSAGARVTMSCKSSQSLLYSENNQDYLAWYQQKPGQFPKLLIYGASNRHTGVPDRFTGSGSGTDFTLTISSVQAEDLADYYCEQTYSYPYTFGAGTKLELK

SEQ ID NO: 1957 - protein, 113 aa, Artificial Sequence
  Description of Artificial Sequence: Synthetic polypeptide
  Clone 14D8 variable region of the light chain
DILINQSPASLTVSTGEKVTMSCRSSQSLLYSEKNQDYLAWYQQKPGQFPKLLIYGASYRHTGVPDRFTGSGSGTDFTLTISSVQAEDLADYYCEQTYSYPYTFGAGTKLELK

SEQ ID NO: 1958 - protein, 113 aa, Artificial Sequence
  Description of Artificial Sequence: Synthetic polypeptide
  Clone 7A12 variable region of the light chain
DILINQSPASLTVSAGEKVTMSCKSSQSLLYSEKNQDYLAWYQQKPGQSPKLLMYGASYRHTGVPDRFTGSGSGTDFTLTISSVQAEDLADYYCEQTYSYPYTFGAGTKLELK

SEQ ID NO: 1959 - protein, 113 aa, Artificial Sequence; identical to SEQ ID NO: 1956
  Description of Artificial Sequence: Synthetic polypeptide
  Clone 8A11 variable region of the light chain

SEQ ID NO: 1960 - protein, 113 aa, Artificial Sequence; identical to SEQ ID NO: 1958
  Description of Artificial Sequence: Synthetic polypeptide
  Clone 21A3 variable region of the light chain

SEQ ID NO: 1961 - protein, 113 aa, Artificial Sequence; identical to SEQ ID NO: 1956
  Description of Artificial Sequence: Synthetic polypeptide
  Clone 10C3 variable region of the light chain

SEQ ID NO: 1962 - protein, 113 aa, Artificial Sequence
  Description of Artificial Sequence: Synthetic polypeptide
  Clone 18F9 variable chain of the light region
DILINQSPASLTVSAGEKVTMSCKSSQSLLYSENNQDYLAWYQQKPGQFPKLLIYGASNRHTGVPDRFTGSGSGTDFTLTISSVQAEDLADYYCEQTYSYPYTFGAGTKLELK

SEQ ID NO: 1963 - protein, 113 aa, Artificial Sequence
  Description of Artificial Sequence: Synthetic polypeptide
  Clone 15C5 variable region of the light chain
DILINQSPASLTVSAGEKVTVSCKSSQSLLYSESNQDYLAWYQQKPGQFPKLLIYGASYRHTGVPDRFTGSGSGTDFTLTISSVQAEDLAHYYCEQTYSYPYTFGAGTKLELK

SEQ ID NO: 1964 - protein, 113 aa, Artificial Sequence
  Description of Artificial Sequence: Synthetic polypeptide
  Clone 1G6 variable region of the light chain
DILINQSPASLTVSTGEKVTMSCKSSQSLLYSENKQDYLAWYQQKPGQFPKLLIYGASNRHTGVPDRFTGSGSGTDFTLTINIVQAEDLADYYCEQTYSYPYTFGAGTKLELK

SEQ ID NO: 1965 - protein, 113 aa, Artificial Sequence; identical to SEQ ID NO: 1962
  Description of Artificial Sequence: Synthetic polypeptide
  Consensus sequence

SEQ ID NO: 1966 - protein, 8 aa, Artificial Sequence
  Description of Artificial Sequence: Synthetic peptide
  Clone 14D3 CDR1 of the heavy chain
GFTFTDFY

SEQ ID NO: 1967 - protein, 8 aa, Artificial Sequence
  Description of Artificial Sequence: Synthetic peptide
  Clone 14D8 CDR1 of the heavy chain
GFTFTDFY

SEQ ID NO: 1968 - protein, 8 aa, Artificial Sequence
  Description of Artificial Sequence: Synthetic peptide
  Clone 7A12 CDR1 of the heavy chain
GFTFTDFY

SEQ ID NO: 1969 - protein, 8 aa, Artificial Sequence
  Description of Artificial Sequence: Synthetic peptide
  Clone 8A11 CDR1 of the heavy chain
GFTFTDFY

SEQ ID NO: 1970 - protein, 8 aa, Artificial Sequence
  Description of Artificial Sequence: Synthetic peptide
  Clone 21A3 CDR1 of the heavy chain
GFTFTDFY

SEQ ID NO: 1971 - protein, 8 aa, Artificial Sequence
  Description of Artificial Sequence: Synthetic peptide
  Clone 10C3 CDR1 of the heavy chain
GFTFTDFY

SEQ ID NO: 1972 - protein, 8 aa, Artificial Sequence
  Description of Artificial Sequence: Synthetic peptide
  Clone 18F9 CDR1 of the heavy chain
GFTFTDFY

SEQ ID NO: 1973 - protein, 8 aa, Artificial Sequence
  Description of Artificial Sequence: Synthetic peptide
  Clone 15C5 CDR1
GFTFTDFY

SEQ ID NO: 1974 - protein, 8 aa, Artificial Sequence
  Description of Artificial Sequence: Synthetic peptide
  Clone 1G6 CDR1 of the heavy chain
GFTFTDFY

SEQ ID NO: 1975 - protein, 8 aa, Artificial Sequence
  Description of Artificial Sequence: Synthetic peptide
  Consensus Sequence CDR1 of the heavy chain
GFTFTDFY

SEQ ID NO: 1976 - protein, 10 aa, Artificial Sequence
  Description of Artificial Sequence: Synthetic peptide
  Clone 14D3 CDR2 of the heavy chain
IRNKTKGYTT

SEQ ID NO: 1977 - protein, 10 aa, Artificial Sequence
  Description of Artificial Sequence: Synthetic peptide
  Clone 14D8 CDR2 of the heavy chain
IRNKANGYTT

SEQ ID NO: 1978 - protein, 10 aa, Artificial Sequence
  Description of Artificial Sequence: Synthetic peptide
  Clone 7A12 CDR2
IRNKANGYTT

SEQ ID NO: 1979 - protein, 10 aa, Artificial Sequence
  Description of Artificial Sequence: Synthetic peptide
  Clone 8A11 CDR2 of the heavy chain
IRNKTKGYTT

SEQ ID NO: 1980 - protein, 10 aa, Artificial Sequence
  Description of Artificial Sequence: Synthetic peptide
  Clone 21A3 CDR2 of the heavy chain
IRNKANGYTT

SEQ ID NO: 1981 - protein, 10 aa, Artificial Sequence
  Description of Artificial Sequence: Synthetic peptide
  Clone 10C3 CDR2 of the heavy chain
IRNKTKGYTT

SEQ ID NO: 1982 - protein, 10 aa, Artificial Sequence
  Description of Artificial Sequence: Synthetic peptide
  Clone 18F9 CDR2 of the heavy chain
IRNKVNGYRT

SEQ ID NO: 1983 - protein, 10 aa, Artificial Sequence
  Description of Artificial Sequence: Synthetic peptide
  Clone 15C5 CDR2 of the heavy chain
IRNKAYGYTT

SEQ ID NO: 1984 - protein, 10 aa, Artificial Sequence
  Description of Artificial Sequence: Synthetic peptide
  Clone 1G6 CDR2 of the heavy chain
IRNKANGFTT

SEQ ID NO: 1985 - protein, 10 aa, Artificial Sequence
  Description of Artificial Sequence: Synthetic peptide
  Consensus Sequence CDR2 of the heavy chain
IRNKANGYTT

SEQ ID NO: 1986 - protein, 15 aa, Artificial Sequence
  Description of Artificial Sequence: Synthetic peptide
  Clone 14D3 CDR3 of the heavy chain
ARIGVNNGGSLDYWG

SEQ ID NO: 1987 - protein, 15 aa, Artificial Sequence
  Description of Artificial Sequence: Synthetic peptide
  Clone 14D8 CDR3 of the heavy chain
ARIGINNGGSLDYWG

SEQ ID NO: 1988 - protein, 15 aa, Artificial Sequence
  Description of Artificial Sequence: Synthetic peptide
  Clone 7A12 CDR3 of the heavy chain
ARIGINNGGSLDYWG

SEQ ID NO: 1989 - protein, 15 aa, Artificial Sequence
  Description of Artificial Sequence: Synthetic peptide
  Clone 8A11 CDR3 of the heavy chain
ARIGVNNGGSLDYWG

SEQ ID NO: 1990 - protein, 15 aa, Artificial Sequence
  Description of Artificial Sequence: Synthetic peptide
  Clone 21A3 CDR3 of the heavy chain
ARIGINNGGSLDYWG

SEQ ID NO: 1991 - protein, 15 aa, Artificial Sequence
  Description of Artificial Sequence: Synthetic peptide
  Clone 10C3 CDR3 of the heavy chain
ARIGTNNGGSLDYWG

SEQ ID NO: 1992 - protein, 15 aa, Artificial Sequence
  Description of Artificial Sequence: Synthetic peptide
  Clone 18F9 CDR3 of the heavy chain
ARIGINNGGSLDYWG

SEQ ID NO: 1993 - protein, 15 aa, Artificial Sequence
  Description of Artificial Sequence: Synthetic peptide
  Clone 15C5 CDR3 of the heavy chain
ARIGINYGGSLDYWG

SEQ ID NO: 1994 - protein, 15 aa, Artificial Sequence
  Description of Artificial Sequence: Synthetic peptide
  Clone 1G6 CDR3 of the heavy chain
ARIGINNGGSLDYWG

SEQ ID NO: 1995 - protein, 15 aa, Artificial Sequence
  Description of Artificial Sequence: Synthetic peptide
  Consensus Sequence CDR3 of the heavy chain
ARIGINNGGSLDYWG

SEQ ID NO: 1996 - protein, 12 aa, Artificial Sequence
  Description of Artificial Sequence: Synthetic peptide
  Clone 14D3 CDR1 of the light chain
QSLLYSENNQDY

SEQ ID NO: 1997 - protein, 12 aa, Artificial Sequence
  Description of Artificial Sequence: Synthetic peptide
  Clone 14D8 CDR1 of the light chain
QSLLYSEKNQDY

SEQ ID NO: 1998 - protein, 12 aa, Artificial Sequence
  Description of Artificial Sequence: Synthetic peptide
  Clone 7A12 CDR1 of the light chain
QSLLYSEKNQDY

SEQ ID NO: 1999 - protein, 12 aa, Artificial Sequence
  Description of Artificial Sequence: Synthetic peptide
  Clone 8A11 CDR1 of the light chain
QSLLYSENNQDY

SEQ ID NO: 2000 - protein, 12 aa, Artificial Sequence
  Description of Artificial Sequence: Synthetic peptide
  Clone 21A3 CDR1 of the light chain
QSLLYSEKNQDY

SEQ ID NO: 2001 - protein, 12 aa, Artificial Sequence
  Description of Artificial Sequence: Synthetic peptide
  Clone 10C3 CDR1 of the light chain
QSLLYSENNQDY

SEQ ID NO: 2002 - protein, 12 aa, Artificial Sequence
  Description of Artificial Sequence: Synthetic peptide
  Clone 18F9 CDR1 of the light chain
QSLLYSENNQDY

SEQ ID NO: 2003 - protein, 12 aa, Artificial Sequence
  Description of Artificial Sequence: Synthetic peptide
  Clone 15C5 CDR1 of the light chain
QSLLYSESNQDY

SEQ ID NO: 2004 - protein, 12 aa, Artificial Sequence
  Description of Artificial Sequence: Synthetic peptide
  Clone 1G6 CDR1 of the light chain
QSLLYSENKQDY

SEQ ID NO: 2005 - protein, 12 aa, Artificial Sequence
  Description of Artificial Sequence: Synthetic peptide
  Consensus Sequence CDR1 of the light chain
QSLLYSENNQDY

SEQ ID NO: 2006 - protein, 3 aa, Artificial Sequence
  Description of Artificial Sequence: Synthetic peptide
GAS

SEQ ID NO: 2007 - protein, 3 aa, Artificial Sequence
  Description of Artificial Sequence: Synthetic peptide
GAS

SEQ ID NO: 2008 - protein, 3 aa, Artificial Sequence
  Description of Artificial Sequence: Synthetic peptide
GAS

SEQ ID NO: 2009 - protein, 3 aa, Artificial Sequence
  Description of Artificial Sequence: Synthetic peptide
GAS

SEQ ID NO: 2010 - protein, 3 aa, Artificial Sequence
  Description of Artificial Sequence: Synthetic peptide
GAS

SEQ ID NO: 2011 - protein, 3 aa, Artificial Sequence
  Description of Artificial Sequence: Synthetic peptide
GAS

SEQ ID NO: 2012 - protein, 3 aa, Artificial Sequence
  Description of Artificial Sequence: Synthetic peptide
GAS

SEQ ID NO: 2013 - protein, 3 aa, Artificial Sequence
  Description of Artificial Sequence: Synthetic peptide
GAS

SEQ ID NO: 2014 - protein, 3 aa, Artificial Sequence
  Description of Artificial Sequence: Synthetic peptide
GAS

SEQ ID NO: 2015 - protein, 3 aa, Artificial Sequence
  Description of Artificial Sequence: Synthetic peptide
GAS

SEQ ID NO: 2016 - protein, 9 aa, Artificial Sequence
  Description of Artificial Sequence: Synthetic peptide
  Clone 14D3 CDR3 of the light chain
EQTYSYPYT

SEQ ID NO: 2017 - protein, 9 aa, Artificial Sequence
  Description of Artificial Sequence: Synthetic peptide
  Clone 14D8 CDR3 of the light chain
EQTYSYPYT

SEQ ID NO: 2018 - protein, 9 aa, Artificial Sequence
  Description of Artificial Sequence: Synthetic peptide
  Clone 7A12 CDR3 of the light chain
EQTYSYPYT

SEQ ID NO: 2019 - protein, 9 aa, Artificial Sequence
  Description of Artificial Sequence: Synthetic peptide
  Clone 8A11 CDR3 of the light chain
EQTYSYPYT

SEQ ID NO: 2020 - protein, 9 aa, Artificial Sequence
  Description of Artificial Sequence: Synthetic peptide
  Clone 21A3 CDR3 of the light chain
EQTYSYPYT

SEQ ID NO: 2021 - protein, 9 aa, Artificial Sequence
  Description of Artificial Sequence: Synthetic peptide
  Clone 10C3 CDR3 of the light chain
EQTYSYPYT

SEQ ID NO: 2022 - protein, 9 aa, Artificial Sequence
  Description of Artificial Sequence: Synthetic peptide
  Clone 18F9 CDR3 of the light chain
EQTYSYPYT

SEQ ID NO: 2023 - protein, 9 aa, Artificial Sequence
  Description of Artificial Sequence: Synthetic peptide
  Clone 15C5 CDR3 of the light chain
EQTYSYPYT

SEQ ID NO: 2024 - protein, 9 aa, Artificial Sequence
  Description of Artificial Sequence: Synthetic peptide
  Clone 1G6 CDR3 of the light chain
EQTYSYPYT

SEQ ID NO: 2025 - protein, 9 aa, Artificial Sequence
  Description of Artificial Sequence: Synthetic peptide
  Consensus Sequence CDR3 of the light chain
EQTYSYPYT

SEQ ID NO: 2026 - protein, 13 aa, Artificial Sequence
  Description of Artificial Sequence: Synthetic peptide
  First part of TREM2 WT CTF Flag
SISRSLLEGEIPF

SEQ ID NO: 2027 - protein, 8 aa, Artificial Sequence
  Description of Artificial Sequence: Synthetic peptide
  Last part of TREM2 WT CTF Flag
DYKDDDDK

SEQ ID NO: 2028 - protein, 9 aa, Artificial Sequence
  Description of Artificial Sequence: Synthetic peptide
  First part of Flag-TREM2(133-157)
GDYKDDDDK

SEQ ID NO: 2029 - protein, 9 aa, Artificial Sequence
  Description of Artificial Sequence: Synthetic peptide
  Last part of Flag-TREM2(133-157)
SFEDAHVEH

SEQ ID NO: 2030 - protein, 13 aa, Artificial Sequence
  Description of Artificial Sequence: Synthetic peptide
  First part of TREM2 WT CTF
SISRSLLEGEIPF

SEQ ID NO: 2031 - protein, 9 aa, Artificial Sequence
  Description of Artificial Sequence: Synthetic peptide
  Last part of TREM2 WT CTF
QTLPGLRDT

SEQ ID NO: 2032 - protein, 13 aa, Artificial Sequence
  Description of Artificial Sequence: Synthetic peptide
  First part of TREM2 WT CTF Flag L163
LEGEIPFPPTSIL

SEQ ID NO: 2033 - protein, 8 aa, Artificial Sequence
  Description of Artificial Sequence: Synthetic peptide
  Last part of TREM2 WT CTF Flag L163
DYKDDDDK

SEQ ID NO: 2034 - protein, 13 aa, Artificial Sequence
  Description of Artificial Sequence: Synthetic peptide
  First part of TREM2 WT CTF Flag L164
EGEIPFPPTSILL

SEQ ID NO: 2035 - protein, 8 aa, Artificial Sequence
  Description of Artificial Sequence: Synthetic peptide
  Last part of TREM2 WT CTF Flag L164
DYKDDDDK

SEQ ID NO: 2036 - protein, 13 aa, Artificial Sequence
  Description of Artificial Sequence: Synthetic peptide
  First part of TREM2 WT CTF Flag - E165
GEIPFPPTSILLL

SEQ ID NO: 2037 - protein, 8 aa, Artificial Sequence
  Description of Artificial Sequence: Synthetic peptide
  Last part of TREM2 WT CTF Flag E165
DYKDDDDK

SEQ ID NO: 2038 - protein, 30 aa, Artificial Sequence
  Description of Artificial Sequence: Synthetic polypeptide
  Peptide used for immunization to generate cleavage-site-specific antibodies
EDAHVEHSISRSLLEGEIPFPPTSILLLLA

SEQ ID NO: 2039 - protein, 9 aa, Artificial Sequence
  Description of Artificial Sequence: Synthetic peptide
  HA-tag
YPYDVPDYA

SEQ ID NO: 2040 - protein, 8 aa, Artificial Sequence
  Description of Artificial Sequence: Synthetic peptide
  linker sequence
SGGGGGLE

SEQ ID NO: 2041 - protein, 8 aa, Artificial Sequence
  Description of Artificial Sequence: Synthetic peptide
  C-terminal FLAG tag
DYKDDDDK

SEQ ID NO: 2042 - DNA, 20 bp, Artificial Sequence
  Description of Artificial Sequence: Synthetic oligonucleotide
  Synthetic Construct
ggacagggatccagagttcc

SEQ ID NO: 2043 - DNA, 20 bp, Artificial Sequence
  Description of Artificial Sequence: Synthetic oligonucleotide
  Synthetic Construct
agctgggaaggtgtgcacac

SEQ ID NO: 2044 - DNA, 19 bp, Artificial Sequence
  Description of Artificial Sequence: Synthetic oligonucleotide
  Synthetic Construct
caggggccagtggatagac

SEQ ID NO: 2045 - DNA, 20 bp, Artificial Sequence
  Description of Artificial Sequence: Synthetic oligonucleotide
  Synthetic Construct
gacattgatgtctttggggt

SEQ ID NO: 2046 - DNA, 20 bp, Artificial Sequence
  Description of Artificial Sequence: Synthetic oligonucleotide
  Synthetic Construct
ttcactgccatcaatcttcc

SEQ ID NO: 2047 - protein, 140 aa, Artificial Sequence
  Description of Artificial Sequence: Synthetic polypeptide
  Synthetic Construct
QVQLQQPGAELVKPGASVKLSCKASGYTFTSYWMHWVKQSPGRGLEWIGRSDPTTGGTNYNEKFKTKATLTVDKPSSTAYMQLSSLTSDDSAVYYCVRTSGTGDYWGQGTSLTVSSAKTTAPSVYPLAPVCGGTTGSSVT

SEQ ID NO: 2048 - protein, 140 aa, Artificial Sequence
  Description of Artificial Sequence: Synthetic polypeptide
  Synthetic Construct
DVVMTQTPLSLPVSLGDQASISCRSSQSLVHNNGNTFLHWYLQKPGQSPKLLIYKVSNRFSGVPDRFSGSGSGTDFTLKISRVEAEDLGVYFCSQTTHVPPTFGGGTKLEIKRADAAPTVSIFPPSSEQLTSGGASVVCF

SEQ ID NO: 2049 - protein, 7 aa, Artificial Sequence
  Description of Artificial Sequence: Synthetic peptide
  Synthetic Construct
GYTFTSY

SEQ ID NO: 2050 - protein, 15 aa, Artificial Sequence
  Description of Artificial Sequence: Synthetic peptide
  Synthetic Construct
IGRSDPTTGGTNYNE

SEQ ID NO: 2051 - protein, 9 aa, Artificial Sequence
  Description of Artificial Sequence: Synthetic peptide
  Synthetic Construct
VRTSGTGDY

SEQ ID NO: 2052 - protein, 16 aa, Artificial Sequence
  Description of Artificial Sequence: Synthetic peptide
  Synthetic Construct
RSSQSLVHNNGNTFLH

SEQ ID NO: 2053 - protein, 6 aa, Artificial Sequence
  Description of Artificial Sequence: Synthetic peptide
  Synthetic Construct
VSNRFS

SEQ ID NO: 2054 - protein, 9 aa, Artificial Sequence
  Description of Artificial Sequence: Synthetic peptide
  Synthetic Construct
SQTTHVPPT

SEQ ID NO: 2055 - protein, 122 aa, Artificial Sequence
  Description of Artificial Sequence: Synthetic polypeptide
  Synthetic Construct
QVQLQQSGAELARPGASVKLSCKASGYTFTSYWIQWVKQRPGQGLEWIGTIYPGDGDARYTQKFKGKATLTADKSSSTTYMQLNSLASEDSAVYYCARNGITTAGYYAMDYWGQGTSVTVSS

SEQ ID NO: 2056 - protein, 119 aa, Artificial Sequence
  Description of Artificial Sequence: Synthetic polypeptide
  Synthetic Construct
QVQLQQSGADLLRPGVSVKISCKGSGYTFTDHAMHWVKQSHAESLEWIGVISTYSGDTGYNQKFKGKATMTVDKSSSTAYLELARLTSEDSAIYYCAREGHYDDAMDYWGQGTSVTVSS

SEQ ID NO: 2057 - protein, 119 aa, Artificial Sequence
  Description of Artificial Sequence: Synthetic polypeptide
  Synthetic Construct
EVQLQQSGPELVKPGASVKMSCKASGYTFTSYVMHWVKQKPGQGLEWIGYINPYTDGTKYNEKFKGKATLTSDKSSSTAYMDLSSLTSEDSAVYYCARGEVRRYALDYWGQGTSVTVSS

SEQ ID NO: 2058 - protein, 118 aa, Artificial Sequence
  Description of Artificial Sequence: Synthetic polypeptide
  Synthetic Construct
QVHLQQSGSELRSPGSSVKLSCKDFDSEVFPISYMSWIRQKPGHGFEWIGDILPSIGGRIYGVKFEDRATLDADTVSNTAYLELNSLTSEDSAIYYCARKDYGSLAYWGQGTLVTVSA

SEQ ID NO: 2059 - protein, 122 aa, Artificial Sequence
  Description of Artificial Sequence: Synthetic polypeptide
  Synthetic Construct
EVQLQQSGPELVKPGASVKISCKTSGYTLSEYTMHWVIQSHGKSLEWIGGVIPNSGGTSYNQKFRDKASLTVDKSSSTAYLELRSLTSEDSAVYYCARGDDSYRRGYALDYWGQGTSVTVSS

SEQ ID NO: 2060 - protein, 113 aa, Artificial Sequence
  Description of Artificial Sequence: Synthetic polypeptide
  Synthetic Construct
EVQLQQSGAEVVKPGASVKLSCTASGFNIKDTYMHWVKQRPEQGLEWIGRIDPANGNTKYDPKFQGKATITADTSSNTAYLQLSSLTSEDTAVYYCATLFAYWGQGTLVTVSA

SEQ ID NO: 2061 - protein, 118 aa, Artificial Sequence
  Description of Artificial Sequence: Synthetic polypeptide
  Synthetic Construct
DVQLQESGPGLVKPSQSLSLTCTVTGYSITSDYAWNWIRQFPGNKLEWMGYINYSGRTIYNPSLKSRISITRDTSKNHFFLQLISVTTEDTATYYCARWNGNYGFAYWGQGTLVTVSA

SEQ ID NO: 2062 - protein, 118 aa, Artificial Sequence
  Description of Artificial Sequence: Synthetic polypeptide
  Synthetic Construct
DVQLQESGPGLVKPSQSLSLTCTVTGYSITSDYAWNWIRQFPGNRLEWMGYISFSGSTSYNPSLKSRISITRDTSKNQFFLQLNSVTTEDTATYYCARWNGNYGFAYWGQGTLVTVSA

SEQ ID NO: 2063 - protein, 118 aa, Artificial Sequence
  Description of Artificial Sequence: Synthetic polypeptide
  Synthetic Construct
QVHLQQSGSELRSPGSSVKLSCKDFDSEVFPIAYMSWVRQKPGHGFEWIGDILPSIGRRIYGVKFEDKATLDADTVSNTAYLELNSLTSEDSAIYYCTRKDYGSLAYWGQGTLVTVSA

SEQ ID NO: 2064 - protein, 114 aa, Artificial Sequence
  Description of Artificial Sequence: Synthetic polypeptide
  Synthetic Construct
QVQLKESGPGLVAPSQSLSITCTVSGFSLSRYSVYWVRQPPGKGLEWLGMIWGGGNTDYNSALKSRLSISKDNSKSQVFLKMNSLQTDDSAMYYCVQYGGMDYWGQGTSVTVSS

SEQ ID NO: 2065 - protein, 116 aa, Artificial Sequence
  Description of Artificial Sequence: Synthetic polypeptide
  Synthetic Construct
QVQLQQPGAELVKPGASVKLSCKASGYTFTSYWMHWVKQSPGRGLEWIGRSDPTTGGTNYNEKFKTKATLTVDKPSSTAYMQLSSLTSDDSAVYYCVRTSGTGDYWGQGTSLTVSS

SEQ ID NO: 2066 - protein, 107 aa, Artificial Sequence
  Description of Artificial Sequence: Synthetic polypeptide
  Synthetic Construct
DIQMTQSPASLSVSVGETVTITCRASENIYSNLAWYQQKQGRSPQLLVYAATNLADGVPSRFSGSGSGTQYSLKINSLQSEDFGYYYCQHFWGTPYTFGGGTKVEIK

SEQ ID NO: 2067 - protein, 112 aa, Artificial Sequence
  Description of Artificial Sequence: Synthetic polypeptide
  Synthetic Construct
DVVMTQTPLTLSVTIGQPASFSCKSSQSLLDSDGKTYLNWLLRRPGQSPKRLIYVVSKLDSGVPDRFTGSGSGTDFTLKISRVEAEDLGVYYCWQGTHFPYTFGGGTKLEIK

SEQ ID NO: 2068 - protein, 107 aa, Artificial Sequence
  Description of Artificial Sequence: Synthetic polypeptide
  Synthetic Construct
DIQMTQSSSSFSVSLGDRVTITCKASEDIYNRLAWYQQKPGNAPRLLISGATSLETGVPSRFSGSGSGKDYTLSITSLQTEDVATYYCQQYWSTPWTFGGGTKLEIK

SEQ ID NO: 2069 - protein, 112 aa, Artificial Sequence
  Description of Artificial Sequence: Synthetic polypeptide
  Synthetic Construct
DVVMTQTPLSLPVSLGDQASISCRSSQSLVHINGNTYLQWFLQKPGQSPKLLIYKVSNRFSGVPDRFSGSGSGTAFTLKISRVEAEDLGVYFCSQSTHVPYTFGGGTKLEIK

SEQ ID NO: 2070 - protein, 113 aa, Artificial Sequence
  Description of Artificial Sequence: Synthetic polypeptide
  Synthetic Construct
DIVMSQSPSSLAVSVGEKVTMSCKSSQSLLYSSNQKSYLAWYQQKPGQSPKLLIYWASTRESGVPDRFRGSGSGTDFTLTISSVKAEDLAVYYCQQYFSYPPTFGGGTKLEIK

SEQ ID NO: 2071 - protein, 111 aa, Artificial Sequence
  Description of Artificial Sequence: Synthetic polypeptide
  Synthetic Construct
DIVMTQAAFSNPVTLGTSASISCRSSKSLLHSNGITYLYWYLQKPGQSPQLLIYQMSNLASGVPDRFSSSGSGIDFTLRINRVEAEDVGVYYCAQNLELPTFGSGTKLEIK

SEQ ID NO: 2072 - protein, 112 aa, Artificial Sequence
  Description of Artificial Sequence: Synthetic polypeptide
  Synthetic Construct
DVVMTQNPLSLPVSLGDQASISCRSSQSLVHINGNTYLHWYLQKPGQSPKLLIYKVSNRFSGVPDRFSGSGSGTDFTLKISRVEAEDLGVYFCSQTTHALFTFGSGTKLEIK

SEQ ID NO: 2073 - protein, 112 aa, Artificial Sequence
  Description of Artificial Sequence: Synthetic polypeptide
  Synthetic Construct
DVVMTQTPLSLPVSLGDQASISCRSSQSLVHINGNTYLHWYLQKPGQSPKLLIYKVSNRFSGVPDRFSGSGSGTDFTLKISRVEAEDLGVYFCSQSTHVTFTFGSGTKLEIK

SEQ ID NO: 2074 - protein, 112 aa, Artificial Sequence
  Description of Artificial Sequence: Synthetic polypeptide
  Synthetic Construct
DVVMTQTPLSLPVSLGDQASISCRSSQSLVHINGNTYLQWYLQKPGQSPKLLIYKVSNRFSGVPDRFSGSGSGTDFTLRISRVEAEDLGVYFCSQSTHLPYTFGGGTKLEIK

SEQ ID NO: 2075 - protein, 112 aa, Artificial Sequence
  Description of Artificial Sequence: Synthetic polypeptide
  Synthetic Construct
DVLMTQTPLSLPVSLGDQASISCRSSQSIVHSNGNTYLEWYLQKPGQSPKLLIYKVSNRFSGVPDRFSGSGSGTDFTLKISRVEAEDLGVYYCFQGSHVPYTFGGGTKLEIK

SEQ ID NO: 2076 - protein, 112 aa, Artificial Sequence
  Description of Artificial Sequence: Synthetic polypeptide
  Synthetic Construct
DVVMTQTPLSLPVSLGDQASISCRSSQSLVHNNGNTFLHWYLQKPGQSPKLLIYKVSNRFSGVPDRFSGSGSGTDFTLKISRVEAEDLGVYFCSQTTHVPPTFGGGTKLEIK

SEQ ID NO: 2077 - protein, 10 aa, Artificial Sequence
  Description of Artificial Sequence: Synthetic peptide
  Synthetic Construct
GYTFTSYWMH

SEQ ID NO: 2078 - protein, 17 aa, Artificial Sequence
  Description of Artificial Sequence: Synthetic peptide
  Synthetic Construct
RSDPTTGGTNYNEKFKT

SEQ ID NO: 2079 - protein, 7 aa, Artificial Sequence
  Description of Artificial Sequence: Synthetic peptide
  Synthetic Construct
KVSNRFS

SEQ ID NO: 2080 - protein, 10 aa, Artificial Sequence
  Description of Artificial Sequence: Synthetic peptide
  Synthetic Construct
GYTFTSYWIQ

SEQ ID NO: 2081 - protein, 17 aa, Artificial Sequence
  Description of Artificial Sequence: Synthetic peptide
  Synthetic Construct
TIYPGDGDARYTQKFKG

SEQ ID NO: 2082 - protein, 15 aa, Artificial Sequence
  Description of Artificial Sequence: Synthetic peptide
  Synthetic Construct
ARNGITTAGYYAMDY

SEQ ID NO: 2083 - protein, 11 aa, Artificial Sequence
  Description of Artificial Sequence: Synthetic peptide
  Synthetic Construct
RASENIYSNLA

SEQ ID NO: 2084 - protein, 7 aa, Artificial Sequence
  Description of Artificial Sequence: Synthetic peptide
  Synthetic Construct
AATNLAD

SEQ ID NO: 2085 - protein, 9 aa, Artificial Sequence
  Description of Artificial Sequence: Synthetic peptide
  Synthetic Construct
QHFWGTPYT

SEQ ID NO: 2086 - protein, 10 aa, Artificial Sequence
  Description of Artificial Sequence: Synthetic peptide
  Synthetic Construct
GYTFTDHAMH

SEQ ID NO: 2087 - protein, 17 aa, Artificial Sequence
  Description of Artificial Sequence: Synthetic peptide
  Synthetic Construct
VISTYSGDTGYNQKFKG

SEQ ID NO: 2088 - protein, 12 aa, Artificial Sequence
  Description of Artificial Sequence: Synthetic peptide
  Synthetic Construct
AREGHYDDAMDY

SEQ ID NO: 2089 - protein, 16 aa, Artificial Sequence
  Description of Artificial Sequence: Synthetic peptide
  Synthetic Construct
KSSQSLLDSDGKTYLN

SEQ ID NO: 2090 - protein, 7 aa, Artificial Sequence
  Description of Artificial Sequence: Synthetic peptide
  Synthetic Construct
VVSKLDS

SEQ ID NO: 2091 - protein, 9 aa, Artificial Sequence
  Description of Artificial Sequence: Synthetic peptide
  Synthetic Construct
WQGTHFPYT

SEQ ID NO: 2092 - protein, 10 aa, Artificial Sequence
  Description of Artificial Sequence: Synthetic peptide
  Synthetic Construct
GYTFTSYVMH

SEQ ID NO: 2093 - protein, 17 aa, Artificial Sequence
  Description of Artificial Sequence: Synthetic peptide
  Synthetic Construct
YINPYTDGTKYNEKFKG

SEQ ID NO: 2094 - protein, 12 aa, Artificial Sequence
  Description of Artificial Sequence: Synthetic peptide
  Synthetic Construct
ARGEVRRYALDY

SEQ ID NO: 2095 - protein, 11 aa, Artificial Sequence
  Description of Artificial Sequence: Synthetic peptide
  Synthetic Construct
KASEDIYNRLA

SEQ ID NO: 2096 - protein, 7 aa, Artificial Sequence
  Description of Artificial Sequence: Synthetic peptide
  Synthetic Construct
GATSLET

SEQ ID NO: 2097 - protein, 9 aa, Artificial Sequence
  Description of Artificial Sequence: Synthetic peptide
  Synthetic Construct
QQYWSTPWT

SEQ ID NO: 2098 - protein, 11 aa, Artificial Sequence
  Description of Artificial Sequence: Synthetic peptide
  Synthetic Construct
DSEVFPISYMS

SEQ ID NO: 2099 - protein, 15 aa, Artificial Sequence
  Description of Artificial Sequence: Synthetic peptide
  Synthetic Construct
DILPSIGGRIYGVKF

SEQ ID NO: 2100 - protein, 10 aa, Artificial Sequence
  Description of Artificial Sequence: Synthetic peptide
  Synthetic Construct
ARKDYGSLAY

SEQ ID NO: 2101 - protein, 16 aa, Artificial Sequence
  Description of Artificial Sequence: Synthetic peptide
  Synthetic Construct
RSSQSLVHINGNTYLQ

SEQ ID NO: 2102 - protein, 9 aa, Artificial Sequence
  Description of Artificial Sequence: Synthetic peptide
  Synthetic Construct
SQSTHVPYT

SEQ ID NO: 2103 - protein, 10 aa, Artificial Sequence
  Description of Artificial Sequence: Synthetic peptide
  Synthetic Construct
GYTLSEYTMH

SEQ ID NO: 2104 - protein, 17 aa, Artificial Sequence
  Description of Artificial Sequence: Synthetic peptide
  Synthetic Construct
GVIPNSGGTSYNQKFRD

SEQ ID NO: 2105 - protein, 15 aa, Artificial Sequence
  Description of Artificial Sequence: Synthetic peptide
  Synthetic Construct
ARGDDSYRRGYALDY

SEQ ID NO: 2106 - protein, 17 aa, Artificial Sequence
  Description of Artificial Sequence: Synthetic peptide
  Synthetic Construct
KSSQSLLYSSNQKSYLA

SEQ ID NO: 2107 - protein, 7 aa, Artificial Sequence
  Description of Artificial Sequence: Synthetic peptide
  Synthetic Construct
WASTRES

SEQ ID NO: 2108 - protein, 9 aa, Artificial Sequence
  Description of Artificial Sequence: Synthetic peptide
  Synthetic Construct
QQYFSYPPT

SEQ ID NO: 2109 - protein, 10 aa, Artificial Sequence
  Description of Artificial Sequence: Synthetic peptide
  Synthetic Construct
GFNIKDTYMH

SEQ ID NO: 2110 - protein, 17 aa, Artificial Sequence
  Description of Artificial Sequence: Synthetic peptide
  Synthetic Construct
RIDPANGNTKYDPKFQG

SEQ ID NO: 2111 - protein, 6 aa, Artificial Sequence
  Description of Artificial Sequence: Synthetic peptide
  Synthetic Construct
ATLFAY

SEQ ID NO: 2112 - protein, 16 aa, Artificial Sequence
  Description of Artificial Sequence: Synthetic peptide
  Synthetic Construct
RSSKSLLHSNGITYLY

SEQ ID NO: 2113 - protein, 7 aa, Artificial Sequence
  Description of Artificial Sequence: Synthetic peptide
  Synthetic Construct
QMSNLAS

SEQ ID NO: 2114 - protein, 8 aa, Artificial Sequence
  Description of Artificial Sequence: Synthetic peptide
  Synthetic Construct
AQNLELPT

SEQ ID NO: 2115 - protein, 11 aa, Artificial Sequence
  Description of Artificial Sequence: Synthetic peptide
  Synthetic Construct
GYSITSDYAWN

SEQ ID NO: 2116 - protein, 16 aa, Artificial Sequence
  Description of Artificial Sequence: Synthetic peptide
  Synthetic Construct
YINYSGRTIYNPSLKS

SEQ ID NO: 2117 - protein, 11 aa, Artificial Sequence
  Description of Artificial Sequence: Synthetic peptide
  Synthetic Construct
ARWNGNYGFAY

SEQ ID NO: 2118 - protein, 16 aa, Artificial Sequence
  Description of Artificial Sequence: Synthetic peptide
  Synthetic Construct
RSSQSLVHINGNTYLH

SEQ ID NO: 2119 - protein, 9 aa, Artificial Sequence
  Description of Artificial Sequence: Synthetic peptide
  Synthetic Construct
SQTTHALFT

SEQ ID NO: 2120 - protein, 16 aa, Artificial Sequence
  Description of Artificial Sequence: Synthetic peptide
  Synthetic Construct
YISFSGSTSYNPSLKS

SEQ ID NO: 2121 - protein, 9 aa, Artificial Sequence
  Description of Artificial Sequence: Synthetic peptide
  Synthetic Construct
SQSTHVTFT

SEQ ID NO: 2122 - protein, 11 aa, Artificial Sequence
  Description of Artificial Sequence: Synthetic peptide
  Synthetic Construct
DSEVFPIAYMS

SEQ ID NO: 2123 - protein, 17 aa, Artificial Sequence
  Description of Artificial Sequence: Synthetic peptide
  Synthetic Construct
DILPSIGRRIYGVKFED

SEQ ID NO: 2124 - protein, 8 aa, Artificial Sequence
  Description of Artificial Sequence: Synthetic peptide
  Synthetic Construct
KDYGSLAY

SEQ ID NO: 2125 - protein, 9 aa, Artificial Sequence
  Description of Artificial Sequence: Synthetic peptide
  Synthetic Construct
SQSTHLPYT

SEQ ID NO: 2126 - protein, 10 aa, Artificial Sequence
  Description of Artificial Sequence: Synthetic peptide
  Synthetic Construct
GFSLSRYSVY

SEQ ID NO: 2127 - protein, 16 aa, Artificial Sequence
  Description of Artificial Sequence: Synthetic peptide
  Synthetic Construct
MIWGGGNTDYNSALKS

SEQ ID NO: 2128 - protein, 6 aa, Artificial Sequence
  Description of Artificial Sequence: Synthetic peptide
  Synthetic Construct
YGGMDY

SEQ ID NO: 2129 - protein, 16 aa, Artificial Sequence
  Description of Artificial Sequence: Synthetic peptide
  Synthetic Construct
RSSQSIVHSNGNTYLE

SEQ ID NO: 2130 - protein, 9 aa, Artificial Sequence
  Description of Artificial Sequence: Synthetic peptide
  Synthetic Construct
FQGSHVPYT

SEQ ID NO: 2131 - protein, 223 aa, Artificial Sequence
  Description of Artificial Sequence: Synthetic polypeptide
  Synthetic Construct
QVQLQQPGAELVKPGASVKLSCKASGYTFTSYWMHWVKQSPGRGLEWIGRSDPTTGGTNYNEKFKTKATLTVDKPSSTAYMQLSSLTSDDSAVYYCVRTSGTGDYWGQGTSLTVSSASTKGPSVFPLAPSSKSTSGGTAALGCLVKDYFPEPVTVSWNSGALTSGVHTFPAVLQSSGLYSLSSVVTVPSSSLGTQTYICNVNHKPSNTKVDKKVEPKSCDKTH

SEQ ID NO: 2132 - protein, 446 aa, Artificial Sequence
  Description of Artificial Sequence: Synthetic polypeptide
  Synthetic Construct
QVQLQQPGAELVKPGASVKLSCKASGYTFTSYWMHWVKQSPGRGLEWIGRSDPTTGGTNYNEKFKTKATLTVDKPSSTAYMQLSSLTSDDSAVYYCVRTSGTGDYWGQGTSLTVSSASTKGPSVFPLAPSSKSTSGGTAALGCLVKDYFPEPVTVSWNSGALTSGVHTFPAVLQSSGLYSLSSVVTVPSSSLGTQTYICNVNHKPSNTKVDKKVEPKSCDKTHTCPPCPAPEAAGGPSVFLFPPKPKDTLMISRTPEVTCVVVDVSHEDPEVKFNWYVDGVEVHNAKTKPREEQYNSTYRVVSVLTVLHQDWLNGKEYKCKVSNKALGAPIEKTISKAKGQPREPQVYTLPPSRDELTKNQVSLWCLVKGFYPSDIAVLWESYGTEWASYKTTPPVLDSDGSFFLYSKLTVTKEEWQQGFVFSCSVMHEALHNHYTQKSLSLSPGK

SEQ ID NO: 2133 - protein, 446 aa, Artificial Sequence
  Description of Artificial Sequence: Synthetic polypeptide
  Synthetic Construct
QVQLQQPGAELVKPGASVKLSCKASGYTFTSYWMHWVKQSPGRGLEWIGRSDPTTGGTNYNEKFKTKATLTVDKPSSTAYMQLSSLTSDDSAVYYCVRTSGTGDYWGQGTSLTVSSASTKGPSVFPLAPSSKSTSGGTAALGCLVKDYFPEPVTVSWNSGALTSGVHTFPAVLQSSGLYSLSSVVTVPSSSLGTQTYICNVNHKPSNTKVDKKVEPKSCDKTHTCPPCPAPEAAGGPSVFLFPPKPKDTLMISRTPEVTCVVVDVSHEDPEVKFNWYVDGVEVHNAKTKPREEQYNSTYRVVSVLTVLHQDWLNGKEYKCKVSNKALGAPIEKTISKAKGQPREPQVYTLPPSRDELTKNQVSLSCAVKGFYPSDIAVEWESNGQPENNYKTTPPVLDSDGSFFLVSKLTVDKSRWQQGNVFSCSVMHEALHNHYTQKSLSLSPGK

SEQ ID NO: 2134 - protein, 229 aa, Artificial Sequence
  Description of Artificial Sequence: Synthetic polypeptide
  Synthetic Construct
EVQLQQSGPELVKPGASVKISCKTSGYTLSEYTMHWVIQSHGKSLEWIGGVIPNSGGTSYNQKFRDKASLTVDKSSSTAYLELRSLTSEDSAVYYCARGDDSYRRGYALDYWGQGTSVTVSSASTKGPSVFPLAPSSKSTSGGTAALGCLVKDYFPEPVTVSWNSGALTSGVHTFPAVLQSSGLYSLSSVVTVPSSSLGTQTYICNVNHKPSNTKVDKKVEPKSCDKTH

SEQ ID NO: 2135 - protein, 452 aa, Artificial Sequence
  Description of Artificial Sequence: Synthetic polypeptide
  Synthetic Construct
EVQLQQSGPELVKPGASVKISCKTSGYTLSEYTMHWVIQSHGKSLEWIGGVIPNSGGTSYNQKFRDKASLTVDKSSSTAYLELRSLTSEDSAVYYCARGDDSYRRGYALDYWGQGTSVTVSSASTKGPSVFPLAPSSKSTSGGTAALGCLVKDYFPEPVTVSWNSGALTSGVHTFPAVLQSSGLYSLSSVVTVPSSSLGTQTYICNVNHKPSNTKVDKKVEPKSCDKTHTCPPCPAPEAAGGPSVFLFPPKPKDTLMISRTPEVTCVVVDVSHEDPEVKFNWYVDGVEVHNAKTKPREEQYNSTYRVVSVLTVLHQDWLNGKEYKCKVSNKALGAPIEKTISKAKGQPREPQVYTLPPSRDELTKNQVSLWCLVKGFYPSDIAVLWESYGTEWASYKTTPPVLDSDGSFFLYSKLTVTKEEWQQGFVFSCSVMHEALHNHYTQKSLSLSPGK

SEQ ID NO: 2136 - protein, 452 aa, Artificial Sequence
  Description of Artificial Sequence: Synthetic polypeptide
  Synthetic Construct
EVQLQQSGPELVKPGASVKISCKTSGYTLSEYTMHWVIQSHGKSLEWIGGVIPNSGGTSYNQKFRDKASLTVDKSSSTAYLELRSLTSEDSAVYYCARGDDSYRRGYALDYWGQGTSVTVSSASTKGPSVFPLAPSSKSTSGGTAALGCLVKDYFPEPVTVSWNSGALTSGVHTFPAVLQSSGLYSLSSVVTVPSSSLGTQTYICNVNHKPSNTKVDKKVEPKSCDKTHTCPPCPAPEAAGGPSVFLFPPKPKDTLMISRTPEVTCVVVDVSHEDPEVKFNWYVDGVEVHNAKTKPREEQYNSTYRVVSVLTVLHQDWLNGKEYKCKVSNKALGAPIEKTISKAKGQPREPQVYTLPPSRDELTKNQVSLSCAVKGFYPSDIAVEWESNGQPENNYKTTPPVLDSDGSFFLVSKLTVDKSRWQQGNVFSCSVMHEALHNHYTQKSLSLSPGK

SEQ ID NO: 2137 - protein, 760 aa, Homo sapiens
MMDQARSAFSNLFGGEPLSYTRFSLARQVDGDNSHVEMKLAVDEEENADNNTKANVTKPKRCSGSICYGTIAVIVFFLIGFMIGYLGYCKGVEPKTECERLAGTESPVREEPGEDFPAARRLYWDDLKRKLSEKLDSTDFTGTIKLLNENSYVPREAGSQKDENLALYVENQFREFKLSKVWRDQHFVKIQVKDSAQNSVIIVDKNGRLVYLVENPGGYVAYSKAATVTGKLVHANFGTKKDFEDLYTPVNGSIVIVRAGKITFAEKVANAESLNAIGVLIYMDQTKFPIVNAELSFFGHAHLGTGDPYTPGFPSFNHTQFPPSRSSGLPNIPVQTISRAAAEKLFGNMEGDCPSDWKTDSTCRMVTSESKNVKLTVSNVLKEIKILNIFGVIKGFVEPDHYVVVGAQRDAWGPGAAKSGVGTALLLKLAQMFSDMVLKDGFQPSRSIIFASWSAGDFGSVGATEWLEGYLSSLHLKAFTYINLDKAVLGTSNFKVSASPLLYTLIEKTMQNVKHPVTGQFLYQDSNWASKVEKLTLDNAAFPFLAYSGIPAVSFCFCEDTDYPYLGTTMDTYKELIERIPELNKVARAAAEVAGQFVIKLTHDVELNLDYERYNSQLLSFVRDLNQYRADIKEMGLSLQWLYSARGDFFRATSRLTTDFGNAEKTDRFVMKKLNDRVMRVEYHFLSPYVSPKESPFRHVFWGSGSHTLPALLENLKLRKQNNGAFNETLFRNQLALATWTIQGAANALSGDVWDIDNEF

SEQ ID NO: 2138 - protein, 217 aa, Homo sapiens
APELLGGPSVFLFPPKPKDTLMISRTPEVTCVVVDVSHEDPEVKFNWYVDGVEVHNAKTKPREEQYNSTYRVVSVLTVLHQDWLNGKEYKCKVSNKALPAPIEKTISKAKGQPREPQVYTLPPSRDELTKNQVSLTCLVKGFYPSDIAVEWESNGQPENNYKTTPPVLDSDGSFFLYSKLTVDKSRWQQGNVFSCSVMHEALHNHYTQKSLSLSPGK

SEQ ID NO: 2139 - protein, 15 aa, Homo sapiens
EPKSCDKTHTCPPCP

SEQ ID NO: 2140 - protein, 217 aa, Artificial Sequence
  Description of Artificial Sequence: Synthetic polypeptide
  Synthetic Construct
APELLGGPSVFLFPPKPKDTLMISRTPEVTCVVVDVSHEDPEVKFNWYVDGVEVHNAKTKPREEQYNSTYRVVSVLTVLHQDWLNGKEYKCKVSNKALPAPIEKTISKAKGQPREPQVYTLPPSRDELTKNQVSLTCLVKGFYPSDIAVEWESYGTEWSSYKTTPPVLDSDGSFFLYSKLTVTKEEWQQGFVFSCSVMHEALHNHYTQKSLSLSPGK

SEQ ID NO: 2141 - protein, 217 aa, Artificial Sequence
  Description of Artificial Sequence: Synthetic polypeptide
  Synthetic Construct
APELLGGPSVFLFPPKPKDTLMISRTPEVTCVVVDVSHEDPEVKFNWYVDGVEVHNAKTKPREEQYNSTYRVVSVLTVLHQDWLNGKEYKCKVSNKALPAPIEKTISKAKGQPREPQVYTLPPSRDELTKNQVSLTCLVKGFYPSDIAVWWESYGTEWSSYKTTPPVLDSDGSFFLYSKLTVTKEEWQQGFVFSCSVMHEALHNHYTQKSLSLSPGK

SEQ ID NO: 2142 - protein, 217 aa, Artificial Sequence
  Description of Artificial Sequence: Synthetic polypeptide
  Synthetic Construct
APELLGGPSVFLFPPKPKDTLMISRTPEVTCVVVDVSHEDPEVKFNWYVDGVEVHNAKTKPREEQYNSTYRVVSVLTVLHQDWLNGKEYKCKVSNKALPAPIEKTISKAKGQPREPQVYTLPPSRDELTKNQVSLTCLVKGFYPSDIAVWWESYGTEWSNYKTTPPVLDSDGSFFLYSKLTVTKSEWQQGFVFSCSVMHEALHNHYTQKSLSLSPGK

SEQ ID NO: 2143 - protein, 217 aa, Artificial Sequence
  Description of Artificial Sequence: Synthetic polypeptide
  Synthetic Construct
APELLGGPSVFLFPPKPKDTLMISRTPEVTCVVVDVSHEDPEVKFNWYVDGVEVHNAKTKPREEQYNSTYRVVSVLTVLHQDWLNGKEYKCKVSNKALPAPIEKTISKAKGQPREPQVYTLPPSRDELTKNQVSLTCLVKGFYPSDIAVEWESYGTEWSNYKTTPPVLDSDGSFFLYSKLTVTKEEWQQGFVFSCSVMHEALHNHYTQKSLSLSPGK

SEQ ID NO: 2144 - protein, 217 aa, Artificial Sequence
  Description of Artificial Sequence: Synthetic polypeptide
  Synthetic Construct
APELLGGPSVFLFPPKPKDTLMISRTPEVTCVVVDVSHEDPEVKFNWYVDGVEVHNAKTKPREEQYNSTYRVVSVLTVLHQDWLNGKEYKCKVSNKALPAPIEKTISKAKGQPREPQVYTLPPSRDELTKNQVSLTCLVKGFYPSDIAVWWESYGTEWSNYKTTPPVLDSDGSFFLYSKLTVTKEEWQQGFVFSCSVMHEALHNHYTQKSLSLSPGK

SEQ ID NO: 2145 - protein, 217 aa, Artificial Sequence
  Description of Artificial Sequence: Synthetic polypeptide
  Synthetic Construct
APELLGGPSVFLFPPKPKDTLMISRTPEVTCVVVDVSHEDPEVKFNWYVDGVEVHNAKTKPREEQYNSTYRVVSVLTVLHQDWLNGKEYKCKVSNKALPAPIEKTISKAKGQPREPQVYTLPPSRDELTKNQVSLTCLVKGFYPSDIAVLWESYGTEWSSYKTTPPVLDSDGSFFLYSKLTVTKEEWQQGFVFSCSVMHEALHNHYTQKSLSLSPGK

SEQ ID NO: 2146 - protein, 217 aa, Artificial Sequence
  Description of Artificial Sequence: Synthetic polypeptide
  Synthetic Construct
APELLGGPSVFLFPPKPKDTLMISRTPEVTCVVVDVSHEDPEVKFNWYVDGVEVHNAKTKPREEQYNSTYRVVSVLTVLHQDWLNGKEYKCKVSNKALPAPIEKTISKAKGQPREPQVYTLPPSRDELTKNQVSLTCLVKGFYPSDIAVEWESFGTEWSSYKTTPPVLDSDGSFFLYSKLTVTKEEWQQGFVFSCSVMHEALHNHYTQKSLSLSPGK

SEQ ID NO: 2147 - protein, 217 aa, Artificial Sequence
  Description of Artificial Sequence: Synthetic polypeptide
  Synthetic Construct
APELLGGPSVFLFPPKPKDTLMISRTPEVTCVVVDVSHEDPEVKFNWYVDGVEVHNAKTKPREEQYNSTYRVVSVLTVLHQDWLNGKEYKCKVSNKALPAPIEKTISKAKGQPREPQVYTLPPSRDELTKNQVSLTCLVKGFYPSDIAVEWESYGTEWASYKTTPPVLDSDGSFFLYSKLTVTKEEWQQGFVFSCSVMHEALHNHYTQKSLSLSPGK

SEQ ID NO: 2148 - protein, 217 aa, Artificial Sequence
  Description of Artificial Sequence: Synthetic polypeptide
  Synthetic Construct
APELLGGPSVFLFPPKPKDTLMISRTPEVTCVVVDVSHEDPEVKFNWYVDGVEVHNAKTKPREEQYNSTYRVVSVLTVLHQDWLNGKEYKCKVSNKALPAPIEKTISKAKGQPREPQVYTLPPSRDELTKNQVSLTCLVKGFYPSDIAVEWESYGTEWVSYKTTPPVLDSDGSFFLYSKLTVTKEEWQQGFVFSCSVMHEALHNHYTQKSLSLSPGK

SEQ ID NO: 2149 - protein, 217 aa, Artificial Sequence
  Description of Artificial Sequence: Synthetic polypeptide
  Synthetic Construct
APELLGGPSVFLFPPKPKDTLMISRTPEVTCVVVDVSHEDPEVKFNWYVDGVEVHNAKTKPREEQYNSTYRVVSVLTVLHQDWLNGKEYKCKVSNKALPAPIEKTISKAKGQPREPQVYTLPPSRDELTKNQVSLTCLVKGFYPSDIAVEWESYGTEWSSYKTTPPVLDSDGSFFLYSKLTVSKEEWQQGFVFSCSVMHEALHNHYTQKSLSLSPGK

SEQ ID NO: 2150 - protein, 217 aa, Artificial Sequence
  Description of Artificial Sequence: Synthetic polypeptide
  Synthetic Construct
APELLGGPSVFLFPPKPKDTLMISRTPEVTCVVVDVSHEDPEVKFNWYVDGVEVHNAKTKPREEQYNSTYRVVSVLTVLHQDWLNGKEYKCKVSNKALPAPIEKTISKAKGQPREPQVYTLPPSRDELTKNQVSLTCLVKGFYPSDIAVEWESFGTEWASYKTTPPVLDSDGSFFLYSKLTVTKEEWQQGFVFSCSVMHEALHNHYTQKSLSLSPGK

SEQ ID NO: 2151 - protein, 217 aa, Artificial Sequence
  Description of Artificial Sequence: Synthetic polypeptide
  Synthetic Construct
APELLGGPSVFLFPPKPKDTLMISRTPEVTCVVVDVSHEDPEVKFNWYVDGVEVHNAKTKPREEQYNSTYRVVSVLTVLHQDWLNGKEYKCKVSNKALPAPIEKTISKAKGQPREPQVYTLPPSRDELTKNQVSLTCLVKGFYPSDIAVEWESFGTEWVSYKTTPPVLDSDGSFFLYSKLTVTKEEWQQGFVFSCSVMHEALHNHYTQKSLSLSPGK

SEQ ID NO: 2152 - protein, 217 aa, Artificial Sequence
  Description of Artificial Sequence: Synthetic polypeptide
  Synthetic Construct
APELLGGPSVFLFPPKPKDTLMISRTPEVTCVVVDVSHEDPEVKFNWYVDGVEVHNAKTKPREEQYNSTYRVVSVLTVLHQDWLNGKEYKCKVSNKALPAPIEKTISKAKGQPREPQVYTLPPSRDELTKNQVSLTCLVKGFYPSDIAVWWESFGTEWSSYKTTPPVLDSDGSFFLYSKLTVTKEEWQQGFVFSCSVMHEALHNHYTQKSLSLSPGK

SEQ ID NO: 2153 - protein, 217 aa, Artificial Sequence
  Description of Artificial Sequence: Synthetic polypeptide
  Synthetic Construct
APELLGGPSVFLFPPKPKDTLMISRTPEVTCVVVDVSHEDPEVKFNWYVDGVEVHNAKTKPREEQYNSTYRVVSVLTVLHQDWLNGKEYKCKVSNKALPAPIEKTISKAKGQPREPQVYTLPPSRDELTKNQVSLTCLVKGFYPSDIAVWWESYGTEWASYKTTPPVLDSDGSFFLYSKLTVTKEEWQQGFVFSCSVMHEALHNHYTQKSLSLSPGK

SEQ ID NO: 2154 - protein, 217 aa, Artificial Sequence
  Description of Artificial Sequence: Synthetic polypeptide
  Synthetic Construct
APELLGGPSVFLFPPKPKDTLMISRTPEVTCVVVDVSHEDPEVKFNWYVDGVEVHNAKTKPREEQYNSTYRVVSVLTVLHQDWLNGKEYKCKVSNKALPAPIEKTISKAKGQPREPQVYTLPPSRDELTKNQVSLTCLVKGFYPSDIAVWWESYGTEWVSYKTTPPVLDSDGSFFLYSKLTVTKEEWQQGFVFSCSVMHEALHNHYTQKSLSLSPGK

SEQ ID NO: 2155 - protein, 217 aa, Artificial Sequence
  Description of Artificial Sequence: Synthetic polypeptide
  Synthetic Construct
APELLGGPSVFLFPPKPKDTLMISRTPEVTCVVVDVSHEDPEVKFNWYVDGVEVHNAKTKPREEQYNSTYRVVSVLTVLHQDWLNGKEYKCKVSNKALPAPIEKTISKAKGQPREPQVYTLPPSRDELTKNQVSLTCLVKGFYPSDIAVWWESYGTEWSSYKTTPPVLDSDGSFFLYSKLTVSKEEWQQGFVFSCSVMHEALHNHYTQKSLSLSPGK

SEQ ID NO: 2156 - protein, 217 aa, Artificial Sequence
  Description of Artificial Sequence: Synthetic polypeptide
  Synthetic Construct
APELLGGPSVFLFPPKPKDTLMISRTPEVTCVVVDVSHEDPEVKFNWYVDGVEVHNAKTKPREEQYNSTYRVVSVLTVLHQDWLNGKEYKCKVSNKALPAPIEKTISKAKGQPREPQVYTLPPSRDELTKNQVSLTCLVKGFYPSDIAVWWESFGTEWASYKTTPPVLDSDGSFFLYSKLTVTKEEWQQGFVFSCSVMHEALHNHYTQKSLSLSPGK

SEQ ID NO: 2157 - protein, 217 aa, Artificial Sequence
  Description of Artificial Sequence: Synthetic polypeptide
  Synthetic Construct
APELLGGPSVFLFPPKPKDTLMISRTPEVTCVVVDVSHEDPEVKFNWYVDGVEVHNAKTKPREEQYNSTYRVVSVLTVLHQDWLNGKEYKCKVSNKALPAPIEKTISKAKGQPREPQVYTLPPSRDELTKNQVSLTCLVKGFYPSDIAVWWESFGTEWVSYKTTPPVLDSDGSFFLYSKLTVTKEEWQQGFVFSCSVMHEALHNHYTQKSLSLSPGK

SEQ ID NO: 2158 - protein, 217 aa, Artificial Sequence
  Description of Artificial Sequence: Synthetic polypeptide
  Synthetic Construct
APELLGGPSVFLFPPKPKDTLMISRTPEVTCVVVDVSHEDPEVKFNWYVDGVEVHNAKTKPREEQYNSTYRVVSVLTVLHQDWLNGKEYKCKVSNKALPAPIEKTISKAKGQPREPQVYTLPPSRDELTKNQVSLTCLVKGFYPSDIAVEWESFGTEWSNYKTTPPVLDSDGSFFLYSKLTVTKEEWQQGFVFSCSVMHEALHNHYTQKSLSLSPGK

SEQ ID NO: 2159 - protein, 217 aa, Artificial Sequence
  Description of Artificial Sequence: Synthetic polypeptide
  Synthetic Construct
APELLGGPSVFLFPPKPKDTLMISRTPEVTCVVVDVSHEDPEVKFNWYVDGVEVHNAKTKPREEQYNSTYRVVSVLTVLHQDWLNGKEYKCKVSNKALPAPIEKTISKAKGQPREPQVYTLPPSRDELTKNQVSLTCLVKGFYPSDIAVEWESYGTEWANYKTTPPVLDSDGSFFLYSKLTVTKEEWQQGFVFSCSVMHEALHNHYTQKSLSLSPGK

SEQ ID NO: 2160 - protein, 217 aa, Artificial Sequence
  Description of Artificial Sequence: Synthetic polypeptide
  Synthetic Construct
APELLGGPSVFLFPPKPKDTLMISRTPEVTCVVVDVSHEDPEVKFNWYVDGVEVHNAKTKPREEQYNSTYRVVSVLTVLHQDWLNGKEYKCKVSNKALPAPIEKTISKAKGQPREPQVYTLPPSRDELTKNQVSLTCLVKGFYPSDIAVEWESYGTEWVNYKTTPPVLDSDGSFFLYSKLTVTKEEWQQGFVFSCSVMHEALHNHYTQKSLSLSPGK

SEQ ID NO: 2161 - protein, 217 aa, Artificial Sequence
  Description of Artificial Sequence: Synthetic polypeptide
  Synthetic Construct
APELLGGPSVFLFPPKPKDTLMISRTPEVTCVVVDVSHEDPEVKFNWYVDGVEVHNAKTKPREEQYNSTYRVVSVLTVLHQDWLNGKEYKCKVSNKALPAPIEKTISKAKGQPREPQVYTLPPSRDELTKNQVSLTCLVKGFYPSDIAVEWESYGTEWSNYKTTPPVLDSDGSFFLYSKLTVSKEEWQQGFVFSCSVMHEALHNHYTQKSLSLSPGK

SEQ ID NO: 2162 - protein, 217 aa, Artificial Sequence
  Description of Artificial Sequence: Synthetic polypeptide
  Synthetic Construct
APELLGGPSVFLFPPKPKDTLMISRTPEVTCVVVDVSHEDPEVKFNWYVDGVEVHNAKTKPREEQYNSTYRVVSVLTVLHQDWLNGKEYKCKVSNKALPAPIEKTISKAKGQPREPQVYTLPPSRDELTKNQVSLTCLVKGFYPSDIAVEWESFGTEWANYKTTPPVLDSDGSFFLYSKLTVTKEEWQQGFVFSCSVMHEALHNHYTQKSLSLSPGK

SEQ ID NO: 2163 - protein, 217 aa, Artificial Sequence
  Description of Artificial Sequence: Synthetic polypeptide
  Synthetic Construct
APELLGGPSVFLFPPKPKDTLMISRTPEVTCVVVDVSHEDPEVKFNWYVDGVEVHNAKTKPREEQYNSTYRVVSVLTVLHQDWLNGKEYKCKVSNKALPAPIEKTISKAKGQPREPQVYTLPPSRDELTKNQVSLTCLVKGFYPSDIAVEWESFGTEWVNYKTTPPVLDSDGSFFLYSKLTVTKEEWQQGFVFSCSVMHEALHNHYTQKSLSLSPGK

SEQ ID NO: 2164 - protein, 217 aa, Artificial Sequence
  Description of Artificial Sequence: Synthetic polypeptide
  Synthetic Construct
APELLGGPSVFLFPPKPKDTLMISRTPEVTCVVVDVSHEDPEVKFNWYVDGVEVHNAKTKPREEQYNSTYRVVSVLTVLHQDWLNGKEYKCKVSNKALPAPIEKTISKAKGQPREPQVYTLPPSRDELTKNQVSLTCLVKGFYPSDIAVWWESFGTEWSNYKTTPPVLDSDGSFFLYSKLTVTKEEWQQGFVFSCSVMHEALHNHYTQKSLSLSPGK

SEQ ID NO: 2165 - protein, 217 aa, Artificial Sequence
  Description of Artificial Sequence: Synthetic polypeptide
  Synthetic Construct
APELLGGPSVFLFPPKPKDTLMISRTPEVTCVVVDVSHEDPEVKFNWYVDGVEVHNAKTKPREEQYNSTYRVVSVLTVLHQDWLNGKEYKCKVSNKALPAPIEKTISKAKGQPREPQVYTLPPSRDELTKNQVSLTCLVKGFYPSDIAVWWESYGTEWANYKTTPPVLDSDGSFFLYSKLTVTKEEWQQGFVFSCSVMHEALHNHYTQKSLSLSPGK

SEQ ID NO: 2166 - protein, 217 aa, Artificial Sequence
  Description of Artificial Sequence: Synthetic polypeptide
  Synthetic Construct
APELLGGPSVFLFPPKPKDTLMISRTPEVTCVVVDVSHEDPEVKFNWYVDGVEVHNAKTKPREEQYNSTYRVVSVLTVLHQDWLNGKEYKCKVSNKALPAPIEKTISKAKGQPREPQVYTLPPSRDELTKNQVSLTCLVKGFYPSDIAVWWESYGTEWVNYKTTPPVLDSDGSFFLYSKLTVTKEEWQQGFVFSCSVMHEALHNHYTQKSLSLSPGK

SEQ ID NO: 2167 - protein, 217 aa, Artificial Sequence
  Description of Artificial Sequence: Synthetic polypeptide
  Synthetic Construct
APELLGGPSVFLFPPKPKDTLMISRTPEVTCVVVDVSHEDPEVKFNWYVDGVEVHNAKTKPREEQYNSTYRVVSVLTVLHQDWLNGKEYKCKVSNKALPAPIEKTISKAKGQPREPQVYTLPPSRDELTKNQVSLTCLVKGFYPSDIAVWWESYGTEWSNYKTTPPVLDSDGSFFLYSKLTVSKEEWQQGFVFSCSVMHEALHNHYTQKSLSLSPGK

SEQ ID NO: 2168 - protein, 217 aa, Artificial Sequence
  Description of Artificial Sequence: Synthetic polypeptide
  Synthetic Construct
APELLGGPSVFLFPPKPKDTLMISRTPEVTCVVVDVSHEDPEVKFNWYVDGVEVHNAKTKPREEQYNSTYRVVSVLTVLHQDWLNGKEYKCKVSNKALPAPIEKTISKAKGQPREPQVYTLPPSRDELTKNQVSLTCLVKGFYPSDIAVWWESFGTEWANYKTTPPVLDSDGSFFLYSKLTVTKEEWQQGFVFSCSVMHEALHNHYTQKSLSLSPGK

SEQ ID NO: 2169 - protein, 217 aa, Artificial Sequence
  Description of Artificial Sequence: Synthetic polypeptide
  Synthetic Construct
APELLGGPSVFLFPPKPKDTLMISRTPEVTCVVVDVSHEDPEVKFNWYVDGVEVHNAKTKPREEQYNSTYRVVSVLTVLHQDWLNGKEYKCKVSNKALPAPIEKTISKAKGQPREPQVYTLPPSRDELTKNQVSLTCLVKGFYPSDIAVWWESFGTEWVNYKTTPPVLDSDGSFFLYSKLTVTKEEWQQGFVFSCSVMHEALHNHYTQKSLSLSPGK

SEQ ID NO: 2170 - protein, 217 aa, Artificial Sequence
  Description of Artificial Sequence: Synthetic polypeptide
  Synthetic Construct
APELLGGPSVFLFPPKPKDTLMISRTPEVTCVVVDVSHEDPEVKFNWYVDGVEVHNAKTKPREEQYNSTYRVVSVLTVLHQDWLNGKEYKCKVSNKALPAPIEKTISKAKGQPREPQVYTLPPSRDELTKNQVSLTCLVKGFYPSDIAVLWESFGTEWSSYKTTPPVLDSDGSFFLYSKLTVTKEEWQQGFVFSCSVMHEALHNHYTQKSLSLSPGK

SEQ ID NO: 2171 - protein, 217 aa, Artificial Sequence
  Description of Artificial Sequence: Synthetic polypeptide
  Synthetic Construct
APELLGGPSVFLFPPKPKDTLMISRTPEVTCVVVDVSHEDPEVKFNWYVDGVEVHNAKTKPREEQYNSTYRVVSVLTVLHQDWLNGKEYKCKVSNKALPAPIEKTISKAKGQPREPQVYTLPPSRDELTKNQVSLTCLVKGFYPSDIAVLWESYGTEWASYKTTPPVLDSDGSFFLYSKLTVTKEEWQQGFVFSCSVMHEALHNHYTQKSLSLSPGK

SEQ ID NO: 2172 - protein, 217 aa, Artificial Sequence
  Description of Artificial Sequence: Synthetic polypeptide
  Synthetic Construct
APELLGGPSVFLFPPKPKDTLMISRTPEVTCVVVDVSHEDPEVKFNWYVDGVEVHNAKTKPREEQYNSTYRVVSVLTVLHQDWLNGKEYKCKVSNKALPAPIEKTISKAKGQPREPQVYTLPPSRDELTKNQVSLTCLVKGFYPSDIAVLWESYGTEWVSYKTTPPVLDSDGSFFLYSKLTVTKEEWQQGFVFSCSVMHEALHNHYTQKSLSLSPGK

SEQ ID NO: 2173 - protein, 217 aa, Artificial Sequence
  Description of Artificial Sequence: Synthetic polypeptide
  Synthetic Construct
APELLGGPSVFLFPPKPKDTLMISRTPEVTCVVVDVSHEDPEVKFNWYVDGVEVHNAKTKPREEQYNSTYRVVSVLTVLHQDWLNGKEYKCKVSNKALPAPIEKTISKAKGQPREPQVYTLPPSRDELTKNQVSLTCLVKGFYPSDIAVLWESYGTEWSSYKTTPPVLDSDGSFFLYSKLTVSKEEWQQGFVFSCSVMHEALHNHYTQKSLSLSPGK

SEQ ID NO: 2174 - protein, 217 aa, Artificial Sequence
  Description of Artificial Sequence: Synthetic polypeptide
  Synthetic Construct
APELLGGPSVFLFPPKPKDTLMISRTPEVTCVVVDVSHEDPEVKFNWYVDGVEVHNAKTKPREEQYNSTYRVVSVLTVLHQDWLNGKEYKCKVSNKALPAPIEKTISKAKGQPREPQVYTLPPSRDELTKNQVSLTCLVKGFYPSDIAVLWESFGTEWASYKTTPPVLDSDGSFFLYSKLTVTKEEWQQGFVFSCSVMHEALHNHYTQKSLSLSPGK

SEQ ID NO: 2175 - protein, 217 aa, Artificial Sequence
  Description of Artificial Sequence: Synthetic polypeptide
  Synthetic Construct
APELLGGPSVFLFPPKPKDTLMISRTPEVTCVVVDVSHEDPEVKFNWYVDGVEVHNAKTKPREEQYNSTYRVVSVLTVLHQDWLNGKEYKCKVSNKALPAPIEKTISKAKGQPREPQVYTLPPSRDELTKNQVSLTCLVKGFYPSDIAVLWESFGTEWVSYKTTPPVLDSDGSFFLYSKLTVTKEEWQQGFVFSCSVMHEALHNHYTQKSLSLSPGK

SEQ ID NO: 2176 - protein, 217 aa, Artificial Sequence
  Description of Artificial Sequence: Synthetic polypeptide
  Synthetic Construct
APELLGGPSVFLFPPKPKDTLMISRTPEVTCVVVDVSHEDPEVKFNWYVDGVEVHNAKTKPREEQYNSTYRVVSVLTVLHQDWLNGKEYKCKVSNKALPAPIEKTISKAKGQPREPQVYTLPPSRDELTKNQVSLTCLVKGFYPSDIAVEWESYGTEWSNYKTTPPVLDSDGSFFLYSKLTVTKSEWQQGFVFSCSVMHEALHNHYTQKSLSLSPGK

SEQ ID NO: 2177 - protein, 217 aa, Artificial Sequence
  Description of Artificial Sequence: Synthetic polypeptide
  Synthetic Construct
APELLGGPSVFLFPPKPKDTLMISRTPEVTCVVVDVSHEDPEVKFNWYVDGVEVHNAKTKPREEQYNSTYRVVSVLTVLHQDWLNGKEYKCKVSNKALPAPIEKTISKAKGQPREPQVYTLPPSRDELTKNQVSLTCLVKGFYPSDIAVEWESLGLVWVGYKTTPPVLDSDGSFFLYSKLTVAKSTWQQGWVFSCSVMHEALHNHYTQKSLSLSPGK

SEQ ID NO: 2178 - protein, 217 aa, Artificial Sequence
  Description of Artificial Sequence: Synthetic polypeptide
  Synthetic Construct
APELLGGPSVFLFPPKPKDTLMISRTPEVTCVVVDVSHEDPEVKFNWYVDGVEVHNAKTKPREEQYNSTYRVVSVLTVLHQDWLNGKEYKCKVSNKALPAPIEKTISKAKGQPREPQVYTLPPSRDELTKNQVSLTCLVKGFYPSDIAVEWESYGTVWSHYKTTPPVLDSDGSFFLYSKLTVSKSEWQQGYVFSCSVMHEALHNHYTQKSLSLSPGK

SEQ ID NO: 2179 - protein, 217 aa, Artificial Sequence
  Description of Artificial Sequence: Synthetic polypeptide
  Synthetic Construct
APELLGGPSVFLFPPKPKDTLMISRTPEVTCVVVDVSHEDPEVKFNWYVDGVEVHNAKTKPREEQYNSTYRVVSVLTVLHQDWLNGKEYKCKVSNKALPAPIEKTISKAKGQPREPQVYTLPPSRDELTKNQVSLTCLVKGFYPSDIAVEWESYGTEWSQYKTTPPVLDSDGSFFLYSKLTVEKSDWQQGHVFSCSVMHEALHNHYTQKSLSLSPGK

SEQ ID NO: 2180 - protein, 217 aa, Artificial Sequence
  Description of Artificial Sequence: Synthetic polypeptide
  Synthetic Construct
APELLGGPSVFLFPPKPKDTLMISRTPEVTCVVVDVSHEDPEVKFNWYVDGVEVHNAKTKPREEQYNSTYRVVSVLTVLHQDWLNGKEYKCKVSNKALPAPIEKTISKAKGQPREPQVYTLPPSRDELTKNQVSLTCLVKGFYPSDIAVEWESVGTPWALYKTTPPVLDSDGSFFLYSKLTVLKSEWQQGWVFSCSVMHEALHNHYTQKSLSLSPGK

SEQ ID NO: 2181 - protein, 217 aa, Artificial Sequence
  Description of Artificial Sequence: Synthetic polypeptide
  Synthetic Construct
APELLGGPSVFLFPPKPKDTLMISRTPEVTCVVVDVSHEDPEVKFNWYVDGVEVHNAKTKPREEQYNSTYRVVSVLTVLHQDWLNGKEYKCKVSNKALPAPIEKTISKAKGQPREPQVYTLPPSRDELTKNQVSLTCLVKGFYPSDIAVEWESYGTVWSKYKTTPPVLDSDGSFFLYSKLTVSKSEWQQGFVFSCSVMHEALHNHYTQKSLSLSPGK

SEQ ID NO: 2182 - protein, 217 aa, Artificial Sequence
  Description of Artificial Sequence: Synthetic polypeptide
  Synthetic Construct
APELLGGPSVFLFPPKPKDTLMISRTPEVTCVVVDVSHEDPEVKFNWYVDGVEVHNAKTKPREEQYNSTYRVVSVLTVLHQDWLNGKEYKCKVSNKALPAPIEKTISKAKGQPREPQVYTLPPSRDELTKNQVSLTCLVKGFYPSDIAVEWESLGHVWAVYKTTPPVLDSDGSFFLYSKLTVPKSTWQQGWVFSCSVMHEALHNHYTQKSLSLSPGK

SEQ ID NO: 2183 - protein, 217 aa, Artificial Sequence
  Description of Artificial Sequence: Synthetic polypeptide
  Synthetic Construct
APELLGGPSVFLFPPKPKDTLMISRTPEVTCVVVDVSHEDPEVKFNWYVDGVEVHNAKTKPREEQYNSTYRVVSVLTVLHQDWLNGKEYKCKVSNKALPAPIEKTISKAKGQPREPQVYTLPPSRDELTKNQVSLTCLVKGFYPSDIAVEWESLGLVWVGYKTTPPVLDSDGSFFLYSKLTVPKSTWQQGWVFSCSVMHEALHNHYTQKSLSLSPGK

SEQ ID NO: 2184 - protein, 217 aa, Artificial Sequence
  Description of Artificial Sequence: Synthetic polypeptide
  Synthetic Construct
APELLGGPSVFLFPPKPKDTLMISRTPEVTCVVVDVSHEDPEVKFNWYVDGVEVHNAKTKPREEQYNSTYRVVSVLTVLHQDWLNGKEYKCKVSNKALPAPIEKTISKAKGQPREPQVYTLPPSRDELTKNQVSLTCLVKGFYPSDIAVEWESMGHVWVGYKTTPPVLDSDGSFFLYSKLTVDKSTWQQGWVFSCSVMHEALHNHYTQKSLSLSPGK

SEQ ID NO: 2185 - protein, 217 aa, Artificial Sequence
  Description of Artificial Sequence: Synthetic polypeptide
  Synthetic Construct
APELLGGPSVFLFPPKPKDTLMISRTPEVTCVVVDVSHEDPEVKFNWYVDGVEVHNAKTKPREEQYNSTYRVVSVLTVLHQDWLNGKEYKCKVSNKALPAPIEKTISKAKGQPREPQVYTLPPSRDELTKNQVSLTCLVKGFYPSDIAVEWESLGLVWVFSKTTPPVLDSDGSFFLYSKLTVPKSTWQQGWVFSCSVMHEALHNHYTQKSLSLSPGK

SEQ ID NO: 2186 - protein, 217 aa, Artificial Sequence
  Description of Artificial Sequence: Synthetic polypeptide
  Synthetic Construct
APELLGGPSVFLFPPKPKDTLMISRTPEVTCVVVDVSHEDPEVKFNWYVDGVEVHNAKTKPREEQYNSTYRVVSVLTVLHQDWLNGKEYKCKVSNKALPAPIEKTISKAKGQPREPQVYTLPPSRDELTKNQVSLTCLVKGFYPSDIAVEWESYGTEWSSYKTTPPVLDSDGSFFLYSKLTVTKSEWQQGFVFSCSVMHEALHNHYTQKSLSLSPGK

SEQ ID NO: 2187 - protein, 217 aa, Artificial Sequence
  Description of Artificial Sequence: Synthetic polypeptide
  Synthetic Construct
APELLGGPSVFLFPPKPKDTLMISRTPEVTCVVVDVSHEDPEVKFNWYVDGVEVHNAKTKPREEQYNSTYRVVSVLTVLHQDWLNGKEYKCKVSNKALPAPIEKTISKAKGQPREPQVYTLPPSRDELTKNQVSLTCLVKGFYPSDIAVEWESYGTEWSNYKTTPPVLDSDGSFFLYSKLTVSKSEWQQGFVFSCSVMHEALHNHYTQKSLSLSPGK

SEQ ID NO: 2188 - protein, 217 aa, Artificial Sequence
  Description of Artificial Sequence: Synthetic polypeptide
  Synthetic Construct
APELLGGPSVFLFPPKPKDTLMISRTPEVTCVVVDVSHEDPEVKFNWYVDGVEVHNAKTKPREEQYNSTYRVVSVLTVLHQDWLNGKEYKCKVSNKALPAPIEKTISKAKGQPREPQVYTLPPSRDELTKNQVSLTCLVKGFYPSDIAVEWESLGHVWVGYKTTPPVLDSDGSFFLYSKLTVSKSEWQQGWVFSCSVMHEALHNHYTQKSLSLSPGK

SEQ ID NO: 2189 - protein, 217 aa, Artificial Sequence
  Description of Artificial Sequence: Synthetic polypeptide
  Synthetic Construct
APELLGGPSVFLFPPKPKDTLMISRTPEVTCVVVDVSHEDPEVKFNWYVDGVEVHNAKTKPREEQYNSTYRVVSVLTVLHQDWLNGKEYKCKVSNKALPAPIEKTISKAKGQPREPQVYTLPPSRDELTKNQVSLTCLVKGFYPSDIAVEWESLGHVWVATKTTPPVLDSDGSFFLYSKLTVPKSTWQQGWVFSCSVMHEALHNHYTQKSLSLSPGK

SEQ ID NO: 2190 - protein, 217 aa, Artificial Sequence
  Description of Artificial Sequence: Synthetic polypeptide
  Synthetic Construct
APELLGGPSVFLFPPKPKDTLMISRTPEVTCVVVDVSHEDPEVKFNWYVDGVEVHNAKTKPREEQYNSTYRVVSVLTVLHQDWLNGKEYKCKVSNKALPAPIEKTISKAKGQPREPQVYTLPPSRDELTKNQVSLTCLVKGFYPSDIAVEWESLGPVWVHTKTTPPVLDSDGSFFLYSKLTVPKSTWQQGWVFSCSVMHEALHNHYTQKSLSLSPGK

SEQ ID NO: 2191 - protein, 217 aa, Artificial Sequence
  Description of Artificial Sequence: Synthetic polypeptide
  Synthetic Construct
APELLGGPSVFLFPPKPKDTLMISRTPEVTCVVVDVSHEDPEVKFNWYVDGVEVHNAKTKPREEQYNSTYRVVSVLTVLHQDWLNGKEYKCKVSNKALPAPIEKTISKAKGQPREPQVYTLPPSRDELTKNQVSLTCLVKGFYPSDIAVEWESLGHVWVDQKTTPPVLDSDGSFFLYSKLTVPKSTWQQGWVFSCSVMHEALHNHYTQKSLSLSPGK

SEQ ID NO: 2192 - protein, 217 aa, Artificial Sequence
  Description of Artificial Sequence: Synthetic polypeptide
  Synthetic Construct
APELLGGPSVFLFPPKPKDTLMISRTPEVTCVVVDVSHEDPEVKFNWYVDGVEVHNAKTKPREEQYNSTYRVVSVLTVLHQDWLNGKEYKCKVSNKALPAPIEKTISKAKGQPREPQVYTLPPSRDELTKNQVSLTCLVKGFYPSDIAVEWESLGHVWVNQKTTPPVLDSDGSFFLYSKLTVPKSTWQQGWVFSCSVMHEALHNHYTQKSLSLSPGK

SEQ ID NO: 2193 - protein, 217 aa, Artificial Sequence
  Description of Artificial Sequence: Synthetic polypeptide
  Synthetic Construct
APELLGGPSVFLFPPKPKDTLMISRTPEVTCVVVDVSHEDPEVKFNWYVDGVEVHNAKTKPREEQYNSTYRVVSVLTVLHQDWLNGKEYKCKVSNKALPAPIEKTISKAKGQPREPQVYTLPPSRDELTKNQVSLTCLVKGFYPSDIAVEWESLGHVWVNFKTTPPVLDSDGSFFLYSKLTVPKSTWQQGWVFSCSVMHEALHNHYTQKSLSLSPGK

SEQ ID NO: 2194 - protein, 217 aa, Artificial Sequence
  Description of Artificial Sequence: Synthetic polypeptide
  Synthetic Construct
APELLGGPSVFLFPPKPKDTLMISRTPEVTCVVVDVSHEDPEVKFNWYVDGVEVHNAKTKPREEQYNSTYRVVSVLTVLHQDWLNGKEYKCKVSNKALPAPIEKTISKAKGQPREPQVYTLPPSRDELTKNQVSLTCLVKGFYPSDIAVWWESLGHVWAVYKTTPPVLDSDGSFFLYSKLTVPKSTWQQGWVFSCSVMHEALHNHYTQKSLSLSPGK

SEQ ID NO: 2195 - protein, 217 aa, Artificial Sequence
  Description of Artificial Sequence: Synthetic polypeptide
  Synthetic Construct
APELLGGPSVFLFPPKPKDTLMISRTPEVTCVVVDVSHEDPEVKFNWYVDGVEVHNAKTKPREEQYNSTYRVVSVLTVLHQDWLNGKEYKCKVSNKALPAPIEKTISKAKGQPREPQVYTLPPSRDELTKNQVSLTCLVKGFYPSDIAVLWESLGHVWAVYKTTPPVLDSDGSFFLYSKLTVPKSTWQQGWVFSCSVMHEALHNHYTQKSLSLSPGK

SEQ ID NO: 2196 - protein, 217 aa, Artificial Sequence
  Description of Artificial Sequence: Synthetic polypeptide
  Synthetic Construct
APELLGGPSVFLFPPKPKDTLMISRTPEVTCVVVDVSHEDPEVKFNWYVDGVEVHNAKTKPREEQYNSTYRVVSVLTVLHQDWLNGKEYKCKVSNKALPAPIEKTISKAKGQPREPQVYTLPPSRDELTKNQVSLTCLVKGFYPSDIAVYWESLGHVWAVYKTTPPVLDSDGSFFLYSKLTVPKSTWQQGWVFSCSVMHEALHNHYTQKSLSLSPGK

SEQ ID NO: 2197 - protein, 217 aa, Artificial Sequence
  Description of Artificial Sequence: Synthetic polypeptide
  Synthetic Construct
APELLGGPSVFLFPPKPKDTLMISRTPEVTCVVVDVSHEDPEVKFNWYVDGVEVHNAKTKPREEQYNSTYRVVSVLTVLHQDWLNGKEYKCKVSNKALPAPIEKTISKAKGQPREPQVYTLPPSRDELTKNQVSLTCLVKGFYPSDIAVEWESLGHVWAVYQTTPPVLDSDGSFFLYSKLTVPKSTWQQGWVFSCSVMHEALHNHYTQKSLSLSPGK

SEQ ID NO: 2198 - protein, 217 aa, Artificial Sequence
  Description of Artificial Sequence: Synthetic polypeptide
  Synthetic Construct
APELLGGPSVFLFPPKPKDTLMISRTPEVTCVVVDVSHEDPEVKFNWYVDGVEVHNAKTKPREEQYNSTYRVVSVLTVLHQDWLNGKEYKCKVSNKALPAPIEKTISKAKGQPREPQVYTLPPSRDELTKNQVSLTCLVKGFYPSDIAVEWESLGHVWAVYFTTPPVLDSDGSFFLYSKLTVPKSTWQQGWVFSCSVMHEALHNHYTQKSLSLSPGK

SEQ ID NO: 2199 - protein, 217 aa, Artificial Sequence
  Description of Artificial Sequence: Synthetic polypeptide
  Synthetic Construct
APELLGGPSVFLFPPKPKDTLMISRTPEVTCVVVDVSHEDPEVKFNWYVDGVEVHNAKTKPREEQYNSTYRVVSVLTVLHQDWLNGKEYKCKVSNKALPAPIEKTISKAKGQPREPQVYTLPPSRDELTKNQVSLTCLVKGFYPSDIAVEWESLGHVWAVYHTTPPVLDSDGSFFLYSKLTVPKSTWQQGWVFSCSVMHEALHNHYTQKSLSLSPGK

SEQ ID NO: 2200 - protein, 217 aa, Artificial Sequence; identical to SEQ ID NO: 2194
  Description of Artificial Sequence: Synthetic polypeptide
  Synthetic Construct

SEQ ID NO: 2201 - protein, 217 aa, Artificial Sequence; identical to SEQ ID NO: 2197
  Description of Artificial Sequence: Synthetic polypeptide
  Synthetic Construct

SEQ ID NO: 2202 - protein, 217 aa, Artificial Sequence
  Description of Artificial Sequence: Synthetic polypeptide
  Synthetic Construct
APELLGGPSVFLFPPKPKDTLMISRTPEVTCVVVDVSHEDPEVKFNWYVDGVEVHNAKTKPREEQYNSTYRVVSVLTVLHQDWLNGKEYKCKVSNKALPAPIEKTISKAKGQPREPQVYTLPPSRDELTKNQVSLTCLVKGFYPSDIAVWWESLGHVWAVYQTTPPVLDSDGSFFLYSKLTVPKSTWQQGWVFSCSVMHEALHNHYTQKSLSLSPGK

SEQ ID NO: 2203 - protein, 217 aa, Artificial Sequence
  Description of Artificial Sequence: Synthetic polypeptide
  Synthetic Construct
APELLGGPSVFLFPPKPKDTLMISRTPEVTCVVVDVSHEDPEVKFNWYVDGVEVHNAKTKPREEQYNSTYRVVSVLTVLHQDWLNGKEYKCKVSNKALPAPIEKTISKAKGQPREPQVYTLPPSRDELTKNQVSLTCLVKGFYPSDIAVWWESLGHVWVNQKTTPPVLDSDGSFFLYSKLTVPKSTWQQGWVFSCSVMHEALHNHYTQKSLSLSPGK

SEQ ID NO: 2204 - protein, 217 aa, Artificial Sequence
  Description of Artificial Sequence: Synthetic polypeptide
  Synthetic Construct
APELLGGPSVFLFPPKPKDTLMISRTPEVTCVVVDVSHEDPEVKFNWYVDGVEVHNAKTKPREEQYNSTYRVVSVLTVLHQDWLNGKEYKCKVSNKALPAPIEKTISKAKGQPREPQVYTLPPSRDELTKNQVSLTCLVKGFYPSDIAVEWESLGHVWVNQQTTPPVLDSDGSFFLYSKLTVPKSTWQQGWVFSCSVMHEALHNHYTQKSLSLSPGK

SEQ ID NO: 2205 - protein, 217 aa, Artificial Sequence
  Description of Artificial Sequence: Synthetic polypeptide
  Synthetic Construct
APELLGGPSVFLFPPKPKDTLMISRTPEVTCVVVDVSHEDPEVKFNWYVDGVEVHNAKTKPREEQYNSTYRVVSVLTVLHQDWLNGKEYKCKVSNKALPAPIEKTISKAKGQPREPQVYTLPPSRDELTKNQVSLTCLVKGFYPSDIAVWWESLGHVWVNQQTTPPVLDSDGSFFLYSKLTVPKSTWQQGWVFSCSVMHEALHNHYTQKSLSLSPGK

SEQ ID NO: 2206 - protein, 217 aa, Artificial Sequence
  Description of Artificial Sequence: Synthetic polypeptide
  Synthetic Construct
APELLGGPSVFLFPPKPKDTLMISRTPEVTCVVVDVSHEDPEVKFNWYVDGVEVHNAKTKPREEQYNSTYRVVSVLTVLHQDWLNGKEYKCKVSNKALPAPIEKTISKAKGQPREPQVYTLPPSRDELTKNQVSLTCLVKGFYPSDIAVWWESYGTEWSSYKTTPPVLDSDGSFFLYSKLTVTKSEWQQGFVFSCSVMHEALHNHYTQKSLSLSPGK

SEQ ID NO: 2207 - protein, 217 aa, Artificial Sequence
  Description of Artificial Sequence: Synthetic polypeptide
  Synthetic Construct
APELLGGPSVFLFPPKPKDTLMISRTPEVTCVVVDVSHEDPEVKFNWYVDGVEVHNAKTKPREEQYNSTYRVVSVLTVLHQDWLNGKEYKCKVSNKALPAPIEKTISKAKGQPREPQVYTLPPSRDELTKNQVSLTCLVKGFYPSDIAVEWESYGTEWSSYQTTPPVLDSDGSFFLYSKLTVTKSEWQQGFVFSCSVMHEALHNHYTQKSLSLSPGK

SEQ ID NO: 2208 - protein, 217 aa, Artificial Sequence
  Description of Artificial Sequence: Synthetic polypeptide
  Synthetic Construct
APELLGGPSVFLFPPKPKDTLMISRTPEVTCVVVDVSHEDPEVKFNWYVDGVEVHNAKTKPREEQYNSTYRVVSVLTVLHQDWLNGKEYKCKVSNKALPAPIEKTISKAKGQPREPQVYTLPPSRDELTKNQVSLTCLVKGFYPSDIAVEWESYGTEWSNYQTTPPVLDSDGSFFLYSKLTVTKSEWQQGFVFSCSVMHEALHNHYTQKSLSLSPGK

SEQ ID NO: 2209 - protein, 217 aa, Artificial Sequence
  Description of Artificial Sequence: Synthetic polypeptide
  Synthetic Construct
APELLGGPSVFLFPPKPKDTLMISRTPEVTCVVVDVSHEDPEVKFNWYVDGVEVHNAKTKPREEQYNSTYRVVSVLTVLHQDWLNGKEYKCKVSNKALPAPIEKTISKAKGQPREPQVYTLPPSRDELTKNQVSLTCLVKGFYPSDIAVLWESYGTEWSSYKTTPPVLDSDGSFFLYSKLTVTKSEWQQGFVFSCSVMHEALHNHYTQKSLSLSPGK

SEQ ID NO: 2210 - protein, 217 aa, Artificial Sequence
  Description of Artificial Sequence: Synthetic polypeptide
  Synthetic Construct
APELLGGPSVFLFPPKPKDTLMISRTPEVTCVVVDVSHEDPEVKFNWYVDGVEVHNAKTKPREEQYNSTYRVVSVLTVLHQDWLNGKEYKCKVSNKALPAPIEKTISKAKGQPREPQVYTLPPSRDELTKNQVSLTCLVKGFYPSDIAVLWESYGTEWSSYRTTPPVLDSDGSFFLYSKLTVTKSEWQQGFVFSCSVMHEALHNHYTQKSLSLSPGK

SEQ ID NO: 2211 - protein, 217 aa, Artificial Sequence
  Description of Artificial Sequence: Synthetic polypeptide
  Synthetic Construct
APELLGGPSVFLFPPKPKDTLMISRTPEVTCVVVDVSHEDPEVKFNWYVDGVEVHNAKTKPREEQYNSTYRVVSVLTVLHQDWLNGKEYKCKVSNKALPAPIEKTISKAKGQPREPQVYTLPPSRDELTKNQVSLTCLVKGFYPSDIAVLWESYGTEWSSYRTTPPVLDSDGSFFLYSKLTVTREEWQQGFVFSCSVMHEALHNHYTQKSLSLSPGK

SEQ ID NO: 2212 - protein, 217 aa, Artificial Sequence
  Description of Artificial Sequence: Synthetic polypeptide
  Synthetic Construct
APELLGGPSVFLFPPKPKDTLMISRTPEVTCVVVDVSHEDPEVKFNWYVDGVEVHNAKTKPREEQYNSTYRVVSVLTVLHQDWLNGKEYKCKVSNKALPAPIEKTISKAKGQPREPQVYTLPPSRDELTKNQVSLTCLVKGFYPSDIAVLWESYGTEWSSYRTTPPVLDSDGSFFLYSKLTVTGEEWQQGFVFSCSVMHEALHNHYTQKSLSLSPGK

SEQ ID NO: 2213 - protein, 217 aa, Artificial Sequence
  Description of Artificial Sequence: Synthetic polypeptide
  Synthetic Construct
APELLGGPSVFLFPPKPKDTLMISRTPEVTCVVVDVSHEDPEVKFNWYVDGVEVHNAKTKPREEQYNSTYRVVSVLTVLHQDWLNGKEYKCKVSNKALPAPIEKTISKAKGQPREPQVYTLPPSRDELTKNQVSLTCLVKGFYPSDIAVLWESYGTEWSSYRTTPPVLDSDGSFFLYSKLTVTREEWQQGFVFSCWVMHEALHNHYTQKSLSLSPGK

SEQ ID NO: 2214 - protein, 217 aa, Artificial Sequence
  Description of Artificial Sequence: Synthetic polypeptide
  Synthetic Construct
APELLGGPSVFLFPPKPKDTLMISRTPEVTCVVVDVSHEDPEVKFNWYVDGVEVHNAKTKPREEQYNSTYRVVSVLTVLHQDWLNGKEYKCKVSNKALPAPIEKTISKAKGQPREPQVYTLPPSRDELTKNQVSLTCLVKGFYPSDIAVLWESYGTEWSSYRTTPPVLDSDGSFFLYSKLTVTKEEWQQGFVFSCWVMHEALHNHYTQKSLSLSPGK

SEQ ID NO: 2215 - protein, 217 aa, Artificial Sequence
  Description of Artificial Sequence: Synthetic polypeptide
  Synthetic Construct
APELLGGPSVFLFPPKPKDTLMISRTPEVTCVVVDVSHEDPEVKFNWYVDGVEVHNAKTKPREEQYNSTYRVVSVLTVLHQDWLNGKEYKCKVSNKALPAPIEKTISKAKGQPREPQVYTLPPSRDELTKNQVSLTCLVKGFYPSDIAVLWESYGTEWSSYRTTPPVLDSDGSFFLYSKLTVTREEWQQGFVFTCWVMHEALHNHYTQKSLSLSPGK

SEQ ID NO: 2216 - protein, 217 aa, Artificial Sequence
  Description of Artificial Sequence: Synthetic polypeptide
  Synthetic Construct
APELLGGPSVFLFPPKPKDTLMISRTPEVTCVVVDVSHEDPEVKFNWYVDGVEVHNAKTKPREEQYNSTYRVVSVLTVLHQDWLNGKEYKCKVSNKALPAPIEKTISKAKGQPREPQVYTLPPSRDELTKNQVSLTCLVKGFYPSDIAVLWESYGTEWSSYRTTPPVLDSDGSFFLYSKLTVTREEWQQGFVFTCGVMHEALHNHYTQKSLSLSPGK

SEQ ID NO: 2217 - protein, 217 aa, Artificial Sequence
  Description of Artificial Sequence: Synthetic polypeptide
  Synthetic Construct
APELLGGPSVFLFPPKPKDTLMISRTPEVTCVVVDVSHEDPEVKFNWYVDGVEVHNAKTKPREEQYNSTYRVVSVLTVLHQDWLNGKEYKCKVSNKALPAPIEKTISKAKGQPREPQVYTLPPSRDELTKNQVSLTCLVKGFYPSDIAVLWESYGTEWSSYRTTPPVLDSDGSFFLYSKLTVTREEWQQGFVFECWVMHEALHNHYTQKSLSLSPGK

SEQ ID NO: 2218 - protein, 217 aa, Artificial Sequence
  Description of Artificial Sequence: Synthetic polypeptide
  Synthetic Construct
APELLGGPSVFLFPPKPKDTLMISRTPEVTCVVVDVSHEDPEVKFNWYVDGVEVHNAKTKPREEQYNSTYRVVSVLTVLHQDWLNGKEYKCKVSNKALPAPIEKTISKAKGQPREPQVYTLPPSRDELTKNQVSLTCLVKGFYPSDIAVLWESYGTEWSSYRTTPPVLDSDGSFFLYSKLTVTREEWQQGFVFKCWVMHEALHNHYTQKSLSLSPGK

SEQ ID NO: 2219 - protein, 217 aa, Artificial Sequence
  Description of Artificial Sequence: Synthetic polypeptide
  Synthetic Construct
APELLGGPSVFLFPPKPKDTLMISRTPEVTCVVVDVSHEDPEVKFNWYVDGVEVHNAKTKPREEQYNSTYRVVSVLTVLHQDWLNGKEYKCKVSNKALPAPIEKTISKAKGQPREPQVYTLPPSRDELTKNQVSLTCLVKGFYPSDIAVLWESYGTEWSSYRTTPPVLDSDGSFFLYSKLTVTPEEWQQGFVFKCWVMHEALHNHYTQKSLSLSPGK

SEQ ID NO: 2220 - protein, 217 aa, Artificial Sequence
  Description of Artificial Sequence: Synthetic polypeptide
  Synthetic Construct
APELLGGPSVFLFPPKPKDTLMISRTPEVTCVVVDVSHEDPEVKFNWYVDGVEVHNAKTKPREEQYNSTYRVVSVLTVLHQDWLNGKEYKCKVSNKALPAPIEKTISKAKGQPREPQVYTLPPSRDELTKNQVSLTCLVKGFYPSDIAVWWESYGTEWSSYRTTPPVLDSDGSFFLYSKLTVTREEWQQGFVFSCSVMHEALHNHYTQKSLSLSPGK

SEQ ID NO: 2221 - protein, 217 aa, Artificial Sequence
  Description of Artificial Sequence: Synthetic polypeptide
  Synthetic Construct
APELLGGPSVFLFPPKPKDTLMISRTPEVTCVVVDVSHEDPEVKFNWYVDGVEVHNAKTKPREEQYNSTYRVVSVLTVLHQDWLNGKEYKCKVSNKALPAPIEKTISKAKGQPREPQVYTLPPSRDELTKNQVSLTCLVKGFYPSDIAVWWESYGTEWSSYRTTPPVLDSDGSFFLYSKLTVTGEEWQQGFVFSCSVMHEALHNHYTQKSLSLSPGK

SEQ ID NO: 2222 - protein, 217 aa, Artificial Sequence
  Description of Artificial Sequence: Synthetic polypeptide
  Synthetic Construct
APELLGGPSVFLFPPKPKDTLMISRTPEVTCVVVDVSHEDPEVKFNWYVDGVEVHNAKTKPREEQYNSTYRVVSVLTVLHQDWLNGKEYKCKVSNKALPAPIEKTISKAKGQPREPQVYTLPPSRDELTKNQVSLTCLVKGFYPSDIAVWWESYGTEWSSYRTTPPVLDSDGSFFLYSKLTVTREEWQQGFVFTCWVMHEALHNHYTQKSLSLSPGK

SEQ ID NO: 2223 - protein, 217 aa, Artificial Sequence
  Description of Artificial Sequence: Synthetic polypeptide
  Synthetic Construct
APELLGGPSVFLFPPKPKDTLMISRTPEVTCVVVDVSHEDPEVKFNWYVDGVEVHNAKTKPREEQYNSTYRVVSVLTVLHQDWLNGKEYKCKVSNKALPAPIEKTISKAKGQPREPQVYTLPPSRDELTKNQVSLTCLVKGFYPSDIAVWWESYGTEWSSYRTTPPVLDSDGSFFLYSKLTVTGEEWQQGFVFTCWVMHEALHNHYTQKSLSLSPGK

SEQ ID NO: 2224 - protein, 217 aa, Artificial Sequence
  Description of Artificial Sequence: Synthetic polypeptide
  Synthetic Construct
APELLGGPSVFLFPPKPKDTLMISRTPEVTCVVVDVSHEDPEVKFNWYVDGVEVHNAKTKPREEQYNSTYRVVSVLTVLHQDWLNGKEYKCKVSNKALPAPIEKTISKAKGQPREPQVYTLPPSRDELTKNQVSLTCLVKGFYPSDIAVWWESYGTEWSSYRTTPPVLDSDGSFFLYSKLTVTREEWQQGFVFTCGVMHEALHNHYTQKSLSLSPGK

SEQ ID NO: 2225 - protein, 217 aa, Artificial Sequence
  Description of Artificial Sequence: Synthetic polypeptide
  Synthetic Construct
APELLGGPSVFLFPPKPKDTLMISRTPEVTCVVVDVSHEDPEVKFNWYVDGVEVHNAKTKPREEQYNSTYRVVSVLTVLHQDWLNGKEYKCKVSNKALPAPIEKTISKAKGQPREPQVYTLPPSRDELTKNQVSLTCLVKGFYPSDIAVLWESYGTEWSSYRTTPPVLDSDGSFFLYSKLTVTKEEWQQGFVFSCSVMHEALHNHYTQKSLSLSPGK

SEQ ID NO: 2226 - protein, 217 aa, Artificial Sequence
  Description of Artificial Sequence: Synthetic polypeptide
  Synthetic Construct
APELLGGPSVFLFPPKPKDTLMISRTPEVTCVVVDVSHEDPEVKFNWYVDGVEVHNAKTKPREEQYNSTYRVVSVLTVLHQDWLNGKEYKCKVSNKALPAPIEKTISKAKGQPRFDYVTTLPPSRDELTKNQVSLTCLVKGFYPSDIAVEWESNGQPENNYKTTPPVLDSDGSFFLYSKLTVDKSRWQQGNVFSCSVMHEALHNHYGFHDLSLSPGK

SEQ ID NO: 2227 - protein, 217 aa, Artificial Sequence
  Description of Artificial Sequence: Synthetic polypeptide
  Synthetic Construct
APELLGGPSVFLFPPKPKDTLMISRTPEVTCVVVDVSHEDPEVKFNWYVDGVEVHNAKTKPREEQYNSTYRVVSVLTVLHQDWLNGKEYKCKVSNKALPAPIEKTISKAKGQPRFDMVTTLPPSRDELTKNQVSLTCLVKGFYPSDIAVEWESNGQPENNYKTTPPVLDSDGSFFLYSKLTVDKSRWQQGNVFSCSVMHEALHNHYGFHDLSLSPGK

SEQ ID NO: 2228 - protein, 217 aa, Artificial Sequence
  Description of Artificial Sequence: Synthetic polypeptide
  Synthetic Construct
APELLGGPSVFLFPPKPKDTLMISRTPEVTCVVVDVSHEDPEVKFNWYVDGVEVHNAKTKPREEQYNSTYRVVSVLTVLHQDWLNGKEYKCKVSNKALPAPIEKTISKAKGQPRFEYVTTLPPSRDELTKNQVSLTCLVKGFYPSDIAVEWESNGQPENNYKTTPPVLDSDGSFFLYSKLTVDKSRWQQGNVFSCSVMHEALHNHYGFHDLSLSPGK

SEQ ID NO: 2229 - protein, 217 aa, Artificial Sequence
  Description of Artificial Sequence: Synthetic polypeptide
  Synthetic Construct
APELLGGPSVFLFPPKPKDTLMISRTPEVTCVVVDVSHEDPEVKFNWYVDGVEVHNAKTKPREEQYNSTYRVVSVLTVLHQDWLNGKEYKCKVSNKALPAPIEKTISKAKGQPRFEMVTTLPPSRDELTKNQVSLTCLVKGFYPSDIAVEWESNGQPENNYKTTPPVLDSDGSFFLYSKLTVDKSRWQQGNVFSCSVMHEALHNHYGFHDLSLSPGK

SEQ ID NO: 2230 - protein, 217 aa, Artificial Sequence
  Description of Artificial Sequence: Synthetic polypeptide
  Synthetic Construct
APELLGGPSVFLFPPKPKDTLMISRTPEVTCVVVDVSHEDPEVKFNWYVDGVEVHNAKTKPREEQYNSTYRVVSVLTVLHQDWLNGKEYKCKVSNKALPAPIEKTISKAKGQPRFELVTTLPPSRDELTKNQVSLTCLVKGFYPSDIAVEWESNGQPENNYKTTPPVLDSDGSFFLYSKLTVDKSRWQQGNVFSCSVMHEALHNHYGFHDLSLSPGK

SEQ ID NO: 2231 - protein, 217 aa, Artificial Sequence
  Description of Artificial Sequence: Synthetic polypeptide
  Synthetic Construct
APELLGGPSVFLFPPKPKDTLMISRTPEVTCVVVDVSHEDPEVEFIWYVDGVDVRYEWQLPREEQYNSTYRVVSVLTVLHQDWLNGKEYKCKVSNKALPAPIEKTISKAKGQPREPQVYTLPPSRDELTKNQVSLTCLVKGFYPSDIAVEWESNGQPENNYKTTPPVLDSDGSFFLYSKLTVDKSRWQQGNVFSCSVMHEALHNHYTQKSLSLSPGK

SEQ ID NO: 2232 - protein, 217 aa, Artificial Sequence
  Description of Artificial Sequence: Synthetic polypeptide
  Synthetic Construct
APELLGGPSVFLFPPKPKDTLMISRTPEVTCVVVDVSHEDPEVGFVWYVDGVPVSWEWYWPREEQYNSTYRVVSVLTVLHQDWLNGKEYKCKVSNKALPAPIEKTISKAKGQPREPQVYTLPPSRDELTKNQVSLTCLVKGFYPSDIAVEWESNGQPENNYKTTPPVLDSDGSFFLYSKLTVDKSRWQQGNVFSCSVMHEALHNHYTQKSLSLSPGK

SEQ ID NO: 2233 - protein, 217 aa, Artificial Sequence
  Description of Artificial Sequence: Synthetic polypeptide
  Synthetic Construct
APELLGGPSVFLFPPKPKDTLMISRTPEVTCVVVDVSHEDPEVQFDWYVDGVMVRREWHRPREEQYNSTYRVVSVLTVLHQDWLNGKEYKCKVSNKALPAPIEKTISKAKGQPREPQVYTLPPSRDELTKNQVSLTCLVKGFYPSDIAVEWESNGQPENNYKTTPPVLDSDGSFFLYSKLTVDKSRWQQGNVFSCSVMHEALHNHYTQKSLSLSPGK

SEQ ID NO: 2234 - protein, 217 aa, Artificial Sequence
  Description of Artificial Sequence: Synthetic polypeptide
  Synthetic Construct
APELLGGPSVFLFPPKPKDTLMISRTPEVTCVVVDVSHEDPEVSFEWYVDGVPVRWEWQWPREEQYNSTYRVVSVLTVLHQDWLNGKEYKCKVSNKALPAPIEKTISKAKGQPREPQVYTLPPSRDELTKNQVSLTCLVKGFYPSDIAVEWESNGQPENNYKTTPPVLDSDGSFFLYSKLTVDKSRWQQGNVFSCSVMHEALHNHYTQKSLSLSPGK

SEQ ID NO: 2235 - protein, 217 aa, Artificial Sequence
  Description of Artificial Sequence: Synthetic polypeptide
  Synthetic Construct
APELLGGPSVFLFPPKPKDTLMISRTPEVTCVVVDVSHEDPEVAFTWYVDGVPVRWEWQNPREEQYNSTYRVVSVLTVLHQDWLNGKEYKCKVSNKALPAPIEKTISKAKGQPREPQVYTLPPSRDELTKNQVSLTCLVKGFYPSDIAVEWESNGQPENNYKTTPPVLDSDGSFFLYSKLTVDKSRWQQGNVFSCSVMHEALHNHYTQKSLSLSPGK

SEQ ID NO: 2236 - protein, 217 aa, Artificial Sequence
  Description of Artificial Sequence: Synthetic polypeptide
  Synthetic Construct
APELLGGPSVFLFPPKPKDTLMISRTPEVTCVVVDPQTPPWEVKFNWYVDGVEVHNAKTKPREEEYYTYYRVVSVLTVLHQDWLNGKEYKCKVSNKALPAPIEKTISKAKGQPREPQVYTLPPSRDELTKNQVSLTCLVKGFYPSDIAVEWESNGQPENNYKTTPPVLDSDGSFFLYSKLTVDKSRWQQGNVFSCSVMHEALHNHYTQKSLSLSPGK

SEQ ID NO: 2237 - protein, 217 aa, Artificial Sequence
  Description of Artificial Sequence: Synthetic polypeptide
  Synthetic Construct
APELLGGPSVFLFPPKPKDTLMISRTPEVTCVVVDPPSPPWEVKFNWYVDGVEVHNAKTKPREEEYYSNYRVVSVLTVLHQDWLNGKEYKCKVSNKALPAPIEKTISKAKGQPREPQVYTLPPSRDELTKNQVSLTCLVKGFYPSDIAVEWESNGQPENNYKTTPPVLDSDGSFFLYSKLTVDKSRWQQGNVFSCSVMHEALHNHYTQKSLSLSPGK

SEQ ID NO: 2238 - protein, 217 aa, Artificial Sequence
  Description of Artificial Sequence: Synthetic polypeptide
  Synthetic Construct
APELLGGPSVFLFPPKPKDTLMISRTPEVTCVVVDPQTPPWEVKFNWYVDGVEVHNAKTKPREEEYYSNYRVVSVLTVLHQDWLNGKEYKCKVSNKALPAPIEKTISKAKGQPREPQVYTLPPSRDELTKNQVSLTCLVKGFYPSDIAVEWESNGQPENNYKTTPPVLDSDGSFFLYSKLTVDKSRWQQGNVFSCSVMHEALHNHYTQKSLSLSPGK

SEQ ID NO: 2239 - protein, 217 aa, Artificial Sequence
  Description of Artificial Sequence: Synthetic polypeptide
  Synthetic Construct
APELLGGPSVFLFPPKPKDTLMISRTPEVTCVVVDFRGPPWEVKFNWYVDGVEVHNAKTKPREEEYYHDYRVVSVLTVLHQDWLNGKEYKCKVSNKALPAPIEKTISKAKGQPREPQVYTLPPSRDELTKNQVSLTCLVKGFYPSDIAVEWESNGQPENNYKTTPPVLDSDGSFFLYSKLTVDKSRWQQGNVFSCSVMHEALHNHYTQKSLSLSPGK

SEQ ID NO: 2240 - protein, 217 aa, Artificial Sequence
  Description of Artificial Sequence: Synthetic polypeptide
  Synthetic Construct
APELLGGPSVFLFPPKPKDTLMISRTPEVTCVVVDPQTVPWEVKFNWYVDGVEVHNAKTKPREEEYYSNYRVVSVLTVLHQDWLNGKEYKCKVSNKALPAPIEKTISKAKGQPREPQVYTLPPSRDELTKNQVSLTCLVKGFYPSDIAVEWESNGQPENNYKTTPPVLDSDGSFFLYSKLTVDKSRWQQGNVFSCSVMHEALHNHYTQKSLSLSPGK

SEQ ID NO: 2241 - protein, 217 aa, Artificial Sequence
  Description of Artificial Sequence: Synthetic polypeptide
  Synthetic Construct
APELLGGPSVFLFPPKPKDTLMISRTPEVTCVVVDVSVPPRMVKFNWYVDGVEVHNAKTKSLTSQHNSTVRVVSVLTVLHQDWLNGKEYKCKVSNKALPAPIEKTISKAKGQPREPQVYTLPPSRDELTKNQVSLTCLVKGFYPSDIAVEWESNGQPENNYKTTPPVLDSDGSFFLYSKLTVDKSRWQQGNVFSCSVMHEALHNHYTQKSLSLSPGK

SEQ ID NO: 2242 - protein, 217 aa, Artificial Sequence
  Description of Artificial Sequence: Synthetic polypeptide
  Synthetic Construct
APELLGGPSVFLFPPKPKDTLMISRTPEVTCVVVDVSVPPWMVKFNWYVDGVEVHNAKTKSLTSQHNSTVRVVSVLTVLHQDWLNGKEYKCKVSNKALPAPIEKTISKAKGQPREPQVYTLPPSRDELTKNQVSLTCLVKGFYPSDIAVEWESNGQPENNYKTTPPVLDSDGSFFLYSKLTVDKSRWQQGNVFSCSVMHEALHNHYTQKSLSLSPGK

SEQ ID NO: 2243 - protein, 217 aa, Artificial Sequence
  Description of Artificial Sequence: Synthetic polypeptide
  Synthetic Construct
APELLGGPSVFLFPPKPKDTLMISRTPEVTCVVVDVSDMWEYVKFNWYVDGVEVHNAKTKPWVKQLNSTWRVVSVLTVLHQDWLNGKEYKCKVSNKALPAPIEKTISKAKGQPREPQVYTLPPSRDELTKNQVSLTCLVKGFYPSDIAVEWESNGQPENNYKTTPPVLDSDGSFFLYSKLTVDKSRWQQGNVFSCSVMHEALHNHYTQKSLSLSPGK

SEQ ID NO: 2244 - protein, 217 aa, Artificial Sequence
  Description of Artificial Sequence: Synthetic polypeptide
  Synthetic Construct
APELLGGPSVFLFPPKPKDTLMISRTPEVTCVVVDVSDDWTWVKFNWYVDGVEVHNAKTKPWIAQPNSTWRVVSVLTVLHQDWLNGKEYKCKVSNKALPAPIEKTISKAKGQPREPQVYTLPPSRDELTKNQVSLTCLVKGFYPSDIAVEWESNGQPENNYKTTPPVLDSDGSFFLYSKLTVDKSRWQQGNVFSCSVMHEALHNHYTQKSLSLSPGK

SEQ ID NO: 2245 - protein, 217 aa, Artificial Sequence
  Description of Artificial Sequence: Synthetic polypeptide
  Synthetic Construct
APELLGGPSVFLFPPKPKDTLMISRTPEVTCVVVDVSDDWEWVKFNWYVDGVEVHNAKTKPWKLQLNSTWRVVSVLTVLHQDWLNGKEYKCKVSNKALPAPIEKTISKAKGQPREPQVYTLPPSRDELTKNQVSLTCLVKGFYPSDIAVEWESNGQPENNYKTTPPVLDSDGSFFLYSKLTVDKSRWQQGNVFSCSVMHEALHNHYTQKSLSLSPGK

SEQ ID NO: 2246 - protein, 217 aa, Artificial Sequence
  Description of Artificial Sequence: Synthetic polypeptide
  Synthetic Construct
APELLGGPSVFLFPPKPKDTLMISRTPEVTCVVVDVSHEDPWVWFYWYVDGVEVHNAKTKPREEQYNSTYRVVSVLTVLHQDWLNGKEYKCSVVNIALWWSIEKTISKAKGQPREPQVYTLPPSRDELTKNQVSLTCLVKGFYPSDIAVEWESNGQPENNYKTTPPVLDSDGSFFLYSKLTVDKSRWQQGNVFSCSVMHEALHNHYTQKSLSLSPGK

SEQ ID NO: 2247 - protein, 217 aa, Artificial Sequence
  Description of Artificial Sequence: Synthetic polypeptide
  Synthetic Construct
APELLGGPSVFLFPPKPKDTLMISRTPEVTCVVVDVSHEDPVVGFRWYVDGVEVHNAKTKPREEQYNSTYRVVSVLTVLHQDWLNGKEYKCRVSNSALTWKIEKTISKAKGQPREPQVYTLPPSRDELTKNQVSLTCLVKGFYPSDIAVEWESNGQPENNYKTTPPVLDSDGSFFLYSKLTVDKSRWQQGNVFSCSVMHEALHNHYTQKSLSLSPGK

SEQ ID NO: 2248 - protein, 217 aa, Artificial Sequence
  Description of Artificial Sequence: Synthetic polypeptide
  Synthetic Construct
APELLGGPSVFLFPPKPKDTLMISRTPEVTCVVVDVSHEDPVVGFRWYVDGVEVHNAKTKPREEQYNSTYRVVSVLTVLHQDWLNGKEYKCRVSNSALSWRIEKTISKAKGQPREPQVYTLPPSRDELTKNQVSLTCLVKGFYPSDIAVEWESNGQPENNYKTTPPVLDSDGSFFLYSKLTVDKSRWQQGNVFSCSVMHEALHNHYTQKSLSLSPGK

SEQ ID NO: 2249 - protein, 217 aa, Artificial Sequence
  Description of Artificial Sequence: Synthetic polypeptide
  Synthetic Construct
APELLGGPSVFLFPPKPKDTLMISRTPEVTCVVVDVSHEDPIVGFRWYVDGVEVHNAKTKPREEQYNSTYRVVSVLTVLHQDWLNGKEYKCRVSNSALRWRIEKTISKAKGQPREPQVYTLPPSRDELTKNQVSLTCLVKGFYPSDIAVEWESNGQPENNYKTTPPVLDSDGSFFLYSKLTVDKSRWQQGNVFSCSVMHEALHNHYTQKSLSLSPGK

SEQ ID NO: 2250 - protein, 217 aa, Artificial Sequence
  Description of Artificial Sequence: Synthetic polypeptide
  Synthetic Construct
APELLGGPSVFLFPPKPKDTLMISRTPEVTCVVVDVSHEDPAVGFEWYVDGVEVHNAKTKPREEQYNSTYRVVSVLTVLHQDWLNGKEYKCQVFNWALDWVIEKTISKAKGQPREPQVYTLPPSRDELTKNQVSLTCLVKGFYPSDIAVEWESNGQPENNYKTTPPVLDSDGSFFLYSKLTVDKSRWQQGNVFSCSVMHEALHNHYTQKSLSLSPGK

SEQ ID NO: 2251 - protein, 217 aa, Artificial Sequence
  Description of Artificial Sequence: Synthetic polypeptide
  Synthetic Construct
APELLGGPSVFLFPPKPKDTLMISRTPEVTCVVVDVSHEDPEVKFNWYVDGVEVHNAKTKPREEQYNSTYRVVSVLTVLHQDWLNGKEYKCKVSNKALPAPIEKTISKAKGQPREPQVYTLPPSRDELTKNQVSLSCAVKGFYPSDIAVEWESNGQPENNYKTTPPVLDSDGSFFLVSKLTVDKSRWQQGNVFSCSVMHEALHNHYTQKSLSLSPGK

SEQ ID NO: 2252 - protein, 217 aa, Artificial Sequence
  Description of Artificial Sequence: Synthetic polypeptide
  Synthetic Construct
APEAAGGPSVFLFPPKPKDTLMISRTPEVTCVVVDVSHEDPEVKFNWYVDGVEVHNAKTKPREEQYNSTYRVVSVLTVLHQDWLNGKEYKCKVSNKALPAPIEKTISKAKGQPREPQVYTLPPSRDELTKNQVSLSCAVKGFYPSDIAVEWESNGQPENNYKTTPPVLDSDGSFFLVSKLTVDKSRWQQGNVFSCSVMHEALHNHYTQKSLSLSPGK

SEQ ID NO: 2253 - protein, 217 aa, Artificial Sequence
  Description of Artificial Sequence: Synthetic polypeptide
  Synthetic Construct
APELLGGPSVFLFPPKPKDTLYITREPEVTCVVVDVSHEDPEVKFNWYVDGVEVHNAKTKPREEQYNSTYRVVSVLTVLHQDWLNGKEYKCKVSNKALPAPIEKTISKAKGQPREPQVYTLPPSRDELTKNQVSLSCAVKGFYPSDIAVEWESNGQPENNYKTTPPVLDSDGSFFLVSKLTVDKSRWQQGNVFSCSVMHEALHNHYTQKSLSLSPGK

SEQ ID NO: 2254 - protein, 217 aa, Artificial Sequence
  Description of Artificial Sequence: Synthetic polypeptide
  Synthetic Construct
APEAAGGPSVFLFPPKPKDTLYITREPEVTCVVVDVSHEDPEVKFNWYVDGVEVHNAKTKPREEQYNSTYRVVSVLTVLHQDWLNGKEYKCKVSNKALPAPIEKTISKAKGQPREPQVYTLPPSRDELTKNQVSLSCAVKGFYPSDIAVEWESNGQPENNYKTTPPVLDSDGSFFLVSKLTVDKSRWQQGNVFSCSVMHEALHNHYTQKSLSLSPGK

SEQ ID NO: 2255 - protein, 217 aa, Artificial Sequence
  Description of Artificial Sequence: Synthetic polypeptide
  Synthetic Construct
APELLGGPSVFLFPPKPKDTLMISRTPEVTCVVVDVSHEDPEVKFNWYVDGVEVHNAKTKPREEQYNSTYRVVSVLTVLHQDWLNGKEYKCKVSNKALPAPIEKTISKAKGQPREPQVYTLPPSRDELTKNQVSLWCLVKGFYPSDIAVEWESNGQPENNYKTTPPVLDSDGSFFLYSKLTVDKSRWQQGNVFSCSVMHEALHNHYTQKSLSLSPGK

SEQ ID NO: 2256 - protein, 217 aa, Artificial Sequence
  Description of Artificial Sequence: Synthetic polypeptide
  Synthetic Construct
APEAAGGPSVFLFPPKPKDTLMISRTPEVTCVVVDVSHEDPEVKFNWYVDGVEVHNAKTKPREEQYNSTYRVVSVLTVLHQDWLNGKEYKCKVSNKALPAPIEKTISKAKGQPREPQVYTLPPSRDELTKNQVSLWCLVKGFYPSDIAVEWESNGQPENNYKTTPPVLDSDGSFFLYSKLTVDKSRWQQGNVFSCSVMHEALHNHYTQKSLSLSPGK

SEQ ID NO: 2257 - protein, 217 aa, Artificial Sequence
  Description of Artificial Sequence: Synthetic polypeptide
  Synthetic Construct
APELLGGPSVFLFPPKPKDTLYITREPEVTCVVVDVSHEDPEVKFNWYVDGVEVHNAKTKPREEQYNSTYRVVSVLTVLHQDWLNGKEYKCKVSNKALPAPIEKTISKAKGQPREPQVYTLPPSRDELTKNQVSLWCLVKGFYPSDIAVEWESNGQPENNYKTTPPVLDSDGSFFLYSKLTVDKSRWQQGNVFSCSVMHEALHNHYTQKSLSLSPGK

SEQ ID NO: 2258 - protein, 217 aa, Artificial Sequence
  Description of Artificial Sequence: Synthetic polypeptide
  Synthetic Construct
APEAAGGPSVFLFPPKPKDTLYITREPEVTCVVVDVSHEDPEVKFNWYVDGVEVHNAKTKPREEQYNSTYRVVSVLTVLHQDWLNGKEYKCKVSNKALPAPIEKTISKAKGQPREPQVYTLPPSRDELTKNQVSLWCLVKGFYPSDIAVEWESNGQPENNYKTTPPVLDSDGSFFLYSKLTVDKSRWQQGNVFSCSVMHEALHNHYTQKSLSLSPGK

SEQ ID NO: 2259 - protein, 217 aa, Artificial Sequence
  Description of Artificial Sequence: Synthetic polypeptide
  Synthetic Construct
APELLGGPSVFLFPPKPKDTLMISRTPEVTCVVVDVSHEDPEVKFNWYVDGVEVHNAKTKPREEQYNSTYRVVSVLTVLHQDWLNGKEYKCKVSNKALPAPIEKTISKAKGQPREPQVYTLPPSRDELTKNQVSLWCLVKGFYPSDIAVWWESYGTEWSSYKTTPPVLDSDGSFFLYSKLTVTKEEWQQGFVFSCSVMHEALHNHYTQKSLSLSPGK

SEQ ID NO: 2260 - protein, 217 aa, Artificial Sequence
  Description of Artificial Sequence: Synthetic polypeptide
  Synthetic Construct
APEAAGGPSVFLFPPKPKDTLMISRTPEVTCVVVDVSHEDPEVKFNWYVDGVEVHNAKTKPREEQYNSTYRVVSVLTVLHQDWLNGKEYKCKVSNKALPAPIEKTISKAKGQPREPQVYTLPPSRDELTKNQVSLWCLVKGFYPSDIAVWWESYGTEWSSYKTTPPVLDSDGSFFLYSKLTVTKEEWQQGFVFSCSVMHEALHNHYTQKSLSLSPGK

SEQ ID NO: 2261 - protein, 217 aa, Artificial Sequence
  Description of Artificial Sequence: Synthetic polypeptide
  Synthetic Construct
APELLGGPSVFLFPPKPKDTLYITREPEVTCVVVDVSHEDPEVKFNWYVDGVEVHNAKTKPREEQYNSTYRVVSVLTVLHQDWLNGKEYKCKVSNKALPAPIEKTISKAKGQPREPQVYTLPPSRDELTKNQVSLWCLVKGFYPSDIAVWWESYGTEWSSYKTTPPVLDSDGSFFLYSKLTVTKEEWQQGFVFSCSVMHEALHNHYTQKSLSLSPGK

SEQ ID NO: 2262 - protein, 217 aa, Artificial Sequence
  Description of Artificial Sequence: Synthetic polypeptide
  Synthetic Construct
APEAAGGPSVFLFPPKPKDTLYITREPEVTCVVVDVSHEDPEVKFNWYVDGVEVHNAKTKPREEQYNSTYRVVSVLTVLHQDWLNGKEYKCKVSNKALPAPIEKTISKAKGQPREPQVYTLPPSRDELTKNQVSLWCLVKGFYPSDIAVWWESYGTEWSSYKTTPPVLDSDGSFFLYSKLTVTKEEWQQGFVFSCSVMHEALHNHYTQKSLSLSPGK

SEQ ID NO: 2263 - protein, 217 aa, Artificial Sequence
  Description of Artificial Sequence: Synthetic polypeptide
  Synthetic Construct
APELLGGPSVFLFPPKPKDTLMISRTPEVTCVVVDVSHEDPEVKFNWYVDGVEVHNAKTKPREEQYNSTYRVVSVLTVLHQDWLNGKEYKCKVSNKALPAPIEKTISKAKGQPREPQVYTLPPSRDELTKNQVSLSCAVKGFYPSDIAVWWESYGTEWSSYKTTPPVLDSDGSFFLVSKLTVTKEEWQQGFVFSCSVMHEALHNHYTQKSLSLSPGK

SEQ ID NO: 2264 - protein, 217 aa, Artificial Sequence
  Description of Artificial Sequence: Synthetic polypeptide
  Synthetic Construct
APEAAGGPSVFLFPPKPKDTLMISRTPEVTCVVVDVSHEDPEVKFNWYVDGVEVHNAKTKPREEQYNSTYRVVSVLTVLHQDWLNGKEYKCKVSNKALPAPIEKTISKAKGQPREPQVYTLPPSRDELTKNQVSLSCAVKGFYPSDIAVWWESYGTEWSSYKTTPPVLDSDGSFFLVSKLTVTKEEWQQGFVFSCSVMHEALHNHYTQKSLSLSPGK

SEQ ID NO: 2265 - protein, 217 aa, Artificial Sequence
  Description of Artificial Sequence: Synthetic polypeptide
  Synthetic Construct
APELLGGPSVFLFPPKPKDTLYITREPEVTCVVVDVSHEDPEVKFNWYVDGVEVHNAKTKPREEQYNSTYRVVSVLTVLHQDWLNGKEYKCKVSNKALPAPIEKTISKAKGQPREPQVYTLPPSRDELTKNQVSLSCAVKGFYPSDIAVWWESYGTEWSSYKTTPPVLDSDGSFFLVSKLTVTKEEWQQGFVFSCSVMHEALHNHYTQKSLSLSPGK

SEQ ID NO: 2266 - protein, 217 aa, Artificial Sequence
  Description of Artificial Sequence: Synthetic polypeptide
  Synthetic Construct
APEAAGGPSVFLFPPKPKDTLYITREPEVTCVVVDVSHEDPEVKFNWYVDGVEVHNAKTKPREEQYNSTYRVVSVLTVLHQDWLNGKEYKCKVSNKALPAPIEKTISKAKGQPREPQVYTLPPSRDELTKNQVSLSCAVKGFYPSDIAVWWESYGTEWSSYKTTPPVLDSDGSFFLVSKLTVTKEEWQQGFVFSCSVMHEALHNHYTQKSLSLSPGK

SEQ ID NO: 2267 - protein, 217 aa, Artificial Sequence
  Description of Artificial Sequence: Synthetic polypeptide
  Synthetic Construct
APELLGGPSVFLFPPKPKDTLMISRTPEVTCVVVDVSHEDPEVKFNWYVDGVEVHNAKTKPREEQYNSTYRVVSVLTVLHQDWLNGKEYKCKVSNKALPAPIEKTISKAKGQPREPQVYTLPPSRDELTKNQVSLWCLVKGFYPSDIAVEWESFGTEWSSYKTTPPVLDSDGSFFLYSKLTVTKEEWQQGFVFSCSVMHEALHNHYTQKSLSLSPGK

SEQ ID NO: 2268 - protein, 217 aa, Artificial Sequence
  Description of Artificial Sequence: Synthetic polypeptide
  Synthetic Construct
APEAAGGPSVFLFPPKPKDTLMISRTPEVTCVVVDVSHEDPEVKFNWYVDGVEVHNAKTKPREEQYNSTYRVVSVLTVLHQDWLNGKEYKCKVSNKALPAPIEKTISKAKGQPREPQVYTLPPSRDELTKNQVSLWCLVKGFYPSDIAVEWESFGTEWSSYKTTPPVLDSDGSFFLYSKLTVTKEEWQQGFVFSCSVMHEALHNHYTQKSLSLSPGK

SEQ ID NO: 2269 - protein, 217 aa, Artificial Sequence
  Description of Artificial Sequence: Synthetic polypeptide
  Synthetic Construct
APEAAGGPSVFLFPPKPKDTLMISRTPEVTCVVVDVSHEDPEVKFNWYVDGVEVHNAKTKPREEQYNSTYRVVSVLTVLHQDWLNGKEYKCKVSNKALGAPIEKTISKAKGQPREPQVYTLPPSRDELTKNQVSLWCLVKGFYPSDIAVEWESFGTEWSSYKTTPPVLDSDGSFFLYSKLTVTKEEWQQGFVFSCSVMHEALHNHYTQKSLSLSPGK

SEQ ID NO: 2270 - protein, 217 aa, Artificial Sequence
  Description of Artificial Sequence: Synthetic polypeptide
  Synthetic Construct
APELLGGPSVFLFPPKPKDTLYITREPEVTCVVVDVSHEDPEVKFNWYVDGVEVHNAKTKPREEQYNSTYRVVSVLTVLHQDWLNGKEYKCKVSNKALPAPIEKTISKAKGQPREPQVYTLPPSRDELTKNQVSLWCLVKGFYPSDIAVEWESFGTEWSSYKTTPPVLDSDGSFFLYSKLTVTKEEWQQGFVFSCSVMHEALHNHYTQKSLSLSPGK

SEQ ID NO: 2271 - protein, 217 aa, Artificial Sequence
  Description of Artificial Sequence: Synthetic polypeptide
  Synthetic Construct
APEAAGGPSVFLFPPKPKDTLYITREPEVTCVVVDVSHEDPEVKFNWYVDGVEVHNAKTKPREEQYNSTYRVVSVLTVLHQDWLNGKEYKCKVSNKALPAPIEKTISKAKGQPREPQVYTLPPSRDELTKNQVSLWCLVKGFYPSDIAVEWESFGTEWSSYKTTPPVLDSDGSFFLYSKLTVTKEEWQQGFVFSCSVMHEALHNHYTQKSLSLSPGK

SEQ ID NO: 2272 - protein, 217 aa, Artificial Sequence
  Description of Artificial Sequence: Synthetic polypeptide
  Synthetic Construct
APEAAGGPSVFLFPPKPKDTLYITREPEVTCVVVDVSHEDPEVKFNWYVDGVEVHNAKTKPREEQYNSTYRVVSVLTVLHQDWLNGKEYKCKVSNKALGAPIEKTISKAKGQPREPQVYTLPPSRDELTKNQVSLWCLVKGFYPSDIAVEWESFGTEWSSYKTTPPVLDSDGSFFLYSKLTVTKEEWQQGFVFSCSVMHEALHNHYTQKSLSLSPGK

SEQ ID NO: 2273 - protein, 217 aa, Artificial Sequence
  Description of Artificial Sequence: Synthetic polypeptide
  Synthetic Construct
APELLGGPSVFLFPPKPKDTLMISRTPEVTCVVVDVSHEDPEVKFNWYVDGVEVHNAKTKPREEQYNSTYRVVSVLTVLHQDWLNGKEYKCKVSNKALPAPIEKTISKAKGQPREPQVYTLPPSRDELTKNQVSLSCAVKGFYPSDIAVEWESFGTEWSSYKTTPPVLDSDGSFFLVSKLTVTKEEWQQGFVFSCSVMHEALHNHYTQKSLSLSPGK

SEQ ID NO: 2274 - protein, 217 aa, Artificial Sequence
  Description of Artificial Sequence: Synthetic polypeptide
  Synthetic Construct
APEAAGGPSVFLFPPKPKDTLMISRTPEVTCVVVDVSHEDPEVKFNWYVDGVEVHNAKTKPREEQYNSTYRVVSVLTVLHQDWLNGKEYKCKVSNKALPAPIEKTISKAKGQPREPQVYTLPPSRDELTKNQVSLSCAVKGFYPSDIAVEWESFGTEWSSYKTTPPVLDSDGSFFLVSKLTVTKEEWQQGFVFSCSVMHEALHNHYTQKSLSLSPGK

SEQ ID NO: 2275 - protein, 217 aa, Artificial Sequence
  Description of Artificial Sequence: Synthetic polypeptide
  Synthetic Construct
APEAAGGPSVFLFPPKPKDTLMISRTPEVTCVVVDVSHEDPEVKFNWYVDGVEVHNAKTKPREEQYNSTYRVVSVLTVLHQDWLNGKEYKCKVSNKALGAPIEKTISKAKGQPREPQVYTLPPSRDELTKNQVSLSCAVKGFYPSDIAVEWESFGTEWSSYKTTPPVLDSDGSFFLVSKLTVTKEEWQQGFVFSCSVMHEALHNHYTQKSLSLSPGK

SEQ ID NO: 2276 - protein, 217 aa, Artificial Sequence
  Description of Artificial Sequence: Synthetic polypeptide
  Synthetic Construct
APELLGGPSVFLFPPKPKDTLYITREPEVTCVVVDVSHEDPEVKFNWYVDGVEVHNAKTKPREEQYNSTYRVVSVLTVLHQDWLNGKEYKCKVSNKALPAPIEKTISKAKGQPREPQVYTLPPSRDELTKNQVSLSCAVKGFYPSDIAVEWESFGTEWSSYKTTPPVLDSDGSFFLVSKLTVTKEEWQQGFVFSCSVMHEALHNHYTQKSLSLSPGK

SEQ ID NO: 2277 - protein, 217 aa, Artificial Sequence
  Description of Artificial Sequence: Synthetic polypeptide
  Synthetic Construct
APEAAGGPSVFLFPPKPKDTLYITREPEVTCVVVDVSHEDPEVKFNWYVDGVEVHNAKTKPREEQYNSTYRVVSVLTVLHQDWLNGKEYKCKVSNKALPAPIEKTISKAKGQPREPQVYTLPPSRDELTKNQVSLSCAVKGFYPSDIAVEWESFGTEWSSYKTTPPVLDSDGSFFLVSKLTVTKEEWQQGFVFSCSVMHEALHNHYTQKSLSLSPGK

SEQ ID NO: 2278 - protein, 217 aa, Artificial Sequence
  Description of Artificial Sequence: Synthetic polypeptide
  Synthetic Construct
APEAAGGPSVFLFPPKPKDTLYITREPEVTCVVVDVSHEDPEVKFNWYVDGVEVHNAKTKPREEQYNSTYRVVSVLTVLHQDWLNGKEYKCKVSNKALGAPIEKTISKAKGQPREPQVYTLPPSRDELTKNQVSLSCAVKGFYPSDIAVEWESFGTEWSSYKTTPPVLDSDGSFFLVSKLTVTKEEWQQGFVFSCSVMHEALHNHYTQKSLSLSPGK

SEQ ID NO: 2279 - protein, 217 aa, Artificial Sequence
  Description of Artificial Sequence: Synthetic polypeptide
  Synthetic Construct
APELLGGPSVFLFPPKPKDTLMISRTPEVTCVVVDVSHEDPEVKFNWYVDGVEVHNAKTKPREEQYNSTYRVVSVLTVLHQDWLNGKEYKCKVSNKALPAPIEKTISKAKGQPREPQVYTLPPSRDELTKNQVSLWCLVKGFYPSDIAVEWESYGTEWANYKTTPPVLDSDGSFFLYSKLTVTKEEWQQGFVFSCSVMHEALHNHYTQKSLSLSPGK

SEQ ID NO: 2280 - protein, 217 aa, Artificial Sequence
  Description of Artificial Sequence: Synthetic polypeptide
  Synthetic Construct
APEAAGGPSVFLFPPKPKDTLMISRTPEVTCVVVDVSHEDPEVKFNWYVDGVEVHNAKTKPREEQYNSTYRVVSVLTVLHQDWLNGKEYKCKVSNKALPAPIEKTISKAKGQPREPQVYTLPPSRDELTKNQVSLWCLVKGFYPSDIAVEWESYGTEWANYKTTPPVLDSDGSFFLYSKLTVTKEEWQQGFVFSCSVMHEALHNHYTQKSLSLSPGK

SEQ ID NO: 2281 - protein, 217 aa, Artificial Sequence
  Description of Artificial Sequence: Synthetic polypeptide
  Synthetic Construct
APEAAGGPSVFLFPPKPKDTLMISRTPEVTCVVVDVSHEDPEVKFNWYVDGVEVHNAKTKPREEQYNSTYRVVSVLTVLHQDWLNGKEYKCKVSNKALGAPIEKTISKAKGQPREPQVYTLPPSRDELTKNQVSLWCLVKGFYPSDIAVEWESYGTEWANYKTTPPVLDSDGSFFLYSKLTVTKEEWQQGFVFSCSVMHEALHNHYTQKSLSLSPGK

SEQ ID NO: 2282 - protein, 217 aa, Artificial Sequence
  Description of Artificial Sequence: Synthetic polypeptide
  Synthetic Construct
APELLGGPSVFLFPPKPKDTLYITREPEVTCVVVDVSHEDPEVKFNWYVDGVEVHNAKTKPREEQYNSTYRVVSVLTVLHQDWLNGKEYKCKVSNKALPAPIEKTISKAKGQPREPQVYTLPPSRDELTKNQVSLWCLVKGFYPSDIAVEWESYGTEWANYKTTPPVLDSDGSFFLYSKLTVTKEEWQQGFVFSCSVMHEALHNHYTQKSLSLSPGK

SEQ ID NO: 2283 - protein, 217 aa, Artificial Sequence
  Description of Artificial Sequence: Synthetic polypeptide
  Synthetic Construct
APEAAGGPSVFLFPPKPKDTLYITREPEVTCVVVDVSHEDPEVKFNWYVDGVEVHNAKTKPREEQYNSTYRVVSVLTVLHQDWLNGKEYKCKVSNKALPAPIEKTISKAKGQPREPQVYTLPPSRDELTKNQVSLWCLVKGFYPSDIAVEWESYGTEWANYKTTPPVLDSDGSFFLYSKLTVTKEEWQQGFVFSCSVMHEALHNHYTQKSLSLSPGK

SEQ ID NO: 2284 - protein, 217 aa, Artificial Sequence
  Description of Artificial Sequence: Synthetic polypeptide
  Synthetic Construct
APEAAGGPSVFLFPPKPKDTLYITREPEVTCVVVDVSHEDPEVKFNWYVDGVEVHNAKTKPREEQYNSTYRVVSVLTVLHQDWLNGKEYKCKVSNKALGAPIEKTISKAKGQPREPQVYTLPPSRDELTKNQVSLWCLVKGFYPSDIAVEWESYGTEWANYKTTPPVLDSDGSFFLYSKLTVTKEEWQQGFVFSCSVMHEALHNHYTQKSLSLSPGK

SEQ ID NO: 2285 - protein, 217 aa, Artificial Sequence
  Description of Artificial Sequence: Synthetic polypeptide
  Synthetic Construct
APELLGGPSVFLFPPKPKDTLMISRTPEVTCVVVDVSHEDPEVKFNWYVDGVEVHNAKTKPREEQYNSTYRVVSVLTVLHQDWLNGKEYKCKVSNKALPAPIEKTISKAKGQPREPQVYTLPPSRDELTKNQVSLSCAVKGFYPSDIAVEWESYGTEWANYKTTPPVLDSDGSFFLVSKLTVTKEEWQQGFVFSCSVMHEALHNHYTQKSLSLSPGK

SEQ ID NO: 2286 - protein, 217 aa, Artificial Sequence
  Description of Artificial Sequence: Synthetic polypeptide
  Synthetic Construct
APEAAGGPSVFLFPPKPKDTLMISRTPEVTCVVVDVSHEDPEVKFNWYVDGVEVHNAKTKPREEQYNSTYRVVSVLTVLHQDWLNGKEYKCKVSNKALPAPIEKTISKAKGQPREPQVYTLPPSRDELTKNQVSLSCAVKGFYPSDIAVEWESYGTEWANYKTTPPVLDSDGSFFLVSKLTVTKEEWQQGFVFSCSVMHEALHNHYTQKSLSLSPGK

SEQ ID NO: 2287 - protein, 217 aa, Artificial Sequence
  Description of Artificial Sequence: Synthetic polypeptide
  Synthetic Construct
APEAAGGPSVFLFPPKPKDTLMISRTPEVTCVVVDVSHEDPEVKFNWYVDGVEVHNAKTKPREEQYNSTYRVVSVLTVLHQDWLNGKEYKCKVSNKALGAPIEKTISKAKGQPREPQVYTLPPSRDELTKNQVSLSCAVKGFYPSDIAVEWESYGTEWANYKTTPPVLDSDGSFFLVSKLTVTKEEWQQGFVFSCSVMHEALHNHYTQKSLSLSPGK

SEQ ID NO: 2288 - protein, 217 aa, Artificial Sequence
  Description of Artificial Sequence: Synthetic polypeptide
  Synthetic Construct
APELLGGPSVFLFPPKPKDTLYITREPEVTCVVVDVSHEDPEVKFNWYVDGVEVHNAKTKPREEQYNSTYRVVSVLTVLHQDWLNGKEYKCKVSNKALPAPIEKTISKAKGQPREPQVYTLPPSRDELTKNQVSLSCAVKGFYPSDIAVEWESYGTEWANYKTTPPVLDSDGSFFLVSKLTVTKEEWQQGFVFSCSVMHEALHNHYTQKSLSLSPGK

SEQ ID NO: 2289 - protein, 217 aa, Artificial Sequence
  Description of Artificial Sequence: Synthetic polypeptide
  Synthetic Construct
APEAAGGPSVFLFPPKPKDTLYITREPEVTCVVVDVSHEDPEVKFNWYVDGVEVHNAKTKPREEQYNSTYRVVSVLTVLHQDWLNGKEYKCKVSNKALPAPIEKTISKAKGQPREPQVYTLPPSRDELTKNQVSLSCAVKGFYPSDIAVEWESYGTEWANYKTTPPVLDSDGSFFLVSKLTVTKEEWQQGFVFSCSVMHEALHNHYTQKSLSLSPGK

SEQ ID NO: 2290 - protein, 217 aa, Artificial Sequence
  Description of Artificial Sequence: Synthetic polypeptide
  Synthetic Construct
APEAAGGPSVFLFPPKPKDTLYITREPEVTCVVVDVSHEDPEVKFNWYVDGVEVHNAKTKPREEQYNSTYRVVSVLTVLHQDWLNGKEYKCKVSNKALGAPIEKTISKAKGQPREPQVYTLPPSRDELTKNQVSLSCAVKGFYPSDIAVEWESYGTEWANYKTTPPVLDSDGSFFLVSKLTVTKEEWQQGFVFSCSVMHEALHNHYTQKSLSLSPGK

SEQ ID NO: 2291 - protein, 217 aa, Artificial Sequence
  Description of Artificial Sequence: Synthetic polypeptide
  Synthetic Construct
APELLGGPSVFLFPPKPKDTLMISRTPEVTCVVVDVSHEDPEVKFNWYVDGVEVHNAKTKPREEQYNSTYRVVSVLTVLHQDWLNGKEYKCKVSNKALPAPIEKTISKAKGQPREPQVYTLPPSRDELTKNQVSLWCLVKGFYPSDIAVEWESYGTEWVNYKTTPPVLDSDGSFFLYSKLTVTKEEWQQGFVFSCSVMHEALHNHYTQKSLSLSPGK

SEQ ID NO: 2292 - protein, 217 aa, Artificial Sequence
  Description of Artificial Sequence: Synthetic polypeptide
  Synthetic Construct
APEAAGGPSVFLFPPKPKDTLMISRTPEVTCVVVDVSHEDPEVKFNWYVDGVEVHNAKTKPREEQYNSTYRVVSVLTVLHQDWLNGKEYKCKVSNKALPAPIEKTISKAKGQPREPQVYTLPPSRDELTKNQVSLWCLVKGFYPSDIAVEWESYGTEWVNYKTTPPVLDSDGSFFLYSKLTVTKEEWQQGFVFSCSVMHEALHNHYTQKSLSLSPGK

SEQ ID NO: 2293 - protein, 217 aa, Artificial Sequence
  Description of Artificial Sequence: Synthetic polypeptide
  Synthetic Construct
APEAAGGPSVFLFPPKPKDTLMISRTPEVTCVVVDVSHEDPEVKFNWYVDGVEVHNAKTKPREEQYNSTYRVVSVLTVLHQDWLNGKEYKCKVSNKALGAPIEKTISKAKGQPREPQVYTLPPSRDELTKNQVSLWCLVKGFYPSDIAVEWESYGTEWVNYKTTPPVLDSDGSFFLYSKLTVTKEEWQQGFVFSCSVMHEALHNHYTQKSLSLSPGK

SEQ ID NO: 2294 - protein, 217 aa, Artificial Sequence
  Description of Artificial Sequence: Synthetic polypeptide
  Synthetic Construct
APELLGGPSVFLFPPKPKDTLYITREPEVTCVVVDVSHEDPEVKFNWYVDGVEVHNAKTKPREEQYNSTYRVVSVLTVLHQDWLNGKEYKCKVSNKALPAPIEKTISKAKGQPREPQVYTLPPSRDELTKNQVSLWCLVKGFYPSDIAVEWESYGTEWVNYKTTPPVLDSDGSFFLYSKLTVTKEEWQQGFVFSCSVMHEALHNHYTQKSLSLSPGK

SEQ ID NO: 2295 - protein, 217 aa, Artificial Sequence
  Description of Artificial Sequence: Synthetic polypeptide
  Synthetic Construct
APEAAGGPSVFLFPPKPKDTLYITREPEVTCVVVDVSHEDPEVKFNWYVDGVEVHNAKTKPREEQYNSTYRVVSVLTVLHQDWLNGKEYKCKVSNKALPAPIEKTISKAKGQPREPQVYTLPPSRDELTKNQVSLWCLVKGFYPSDIAVEWESYGTEWVNYKTTPPVLDSDGSFFLYSKLTVTKEEWQQGFVFSCSVMHEALHNHYTQKSLSLSPGK

SEQ ID NO: 2296 - protein, 217 aa, Artificial Sequence
  Description of Artificial Sequence: Synthetic polypeptide
  Synthetic Construct
APEAAGGPSVFLFPPKPKDTLYITREPEVTCVVVDVSHEDPEVKFNWYVDGVEVHNAKTKPREEQYNSTYRVVSVLTVLHQDWLNGKEYKCKVSNKALGAPIEKTISKAKGQPREPQVYTLPPSRDELTKNQVSLWCLVKGFYPSDIAVEWESYGTEWVNYKTTPPVLDSDGSFFLYSKLTVTKEEWQQGFVFSCSVMHEALHNHYTQKSLSLSPGK

SEQ ID NO: 2297 - protein, 217 aa, Artificial Sequence
  Description of Artificial Sequence: Synthetic polypeptide
  Synthetic Construct
APELLGGPSVFLFPPKPKDTLMISRTPEVTCVVVDVSHEDPEVKFNWYVDGVEVHNAKTKPREEQYNSTYRVVSVLTVLHQDWLNGKEYKCKVSNKALPAPIEKTISKAKGQPREPQVYTLPPSRDELTKNQVSLSCAVKGFYPSDIAVEWESYGTEWVNYKTTPPVLDSDGSFFLVSKLTVTKEEWQQGFVFSCSVMHEALHNHYTQKSLSLSPGK

SEQ ID NO: 2298 - protein, 217 aa, Artificial Sequence
  Description of Artificial Sequence: Synthetic polypeptide
  Synthetic Construct
APEAAGGPSVFLFPPKPKDTLMISRTPEVTCVVVDVSHEDPEVKFNWYVDGVEVHNAKTKPREEQYNSTYRVVSVLTVLHQDWLNGKEYKCKVSNKALPAPIEKTISKAKGQPREPQVYTLPPSRDELTKNQVSLSCAVKGFYPSDIAVEWESYGTEWVNYKTTPPVLDSDGSFFLVSKLTVTKEEWQQGFVFSCSVMHEALHNHYTQKSLSLSPGK

SEQ ID NO: 2299 - protein, 217 aa, Artificial Sequence
  Description of Artificial Sequence: Synthetic polypeptide
  Synthetic Construct
APEAAGGPSVFLFPPKPKDTLMISRTPEVTCVVVDVSHEDPEVKFNWYVDGVEVHNAKTKPREEQYNSTYRVVSVLTVLHQDWLNGKEYKCKVSNKALGAPIEKTISKAKGQPREPQVYTLPPSRDELTKNQVSLSCAVKGFYPSDIAVEWESYGTEWVNYKTTPPVLDSDGSFFLVSKLTVTKEEWQQGFVFSCSVMHEALHNHYTQKSLSLSPGK

SEQ ID NO: 2300 - protein, 217 aa, Artificial Sequence
  Description of Artificial Sequence: Synthetic polypeptide
  Synthetic Construct
APELLGGPSVFLFPPKPKDTLYITREPEVTCVVVDVSHEDPEVKFNWYVDGVEVHNAKTKPREEQYNSTYRVVSVLTVLHQDWLNGKEYKCKVSNKALPAPIEKTISKAKGQPREPQVYTLPPSRDELTKNQVSLSCAVKGFYPSDIAVEWESYGTEWVNYKTTPPVLDSDGSFFLVSKLTVTKEEWQQGFVFSCSVMHEALHNHYTQKSLSLSPGK

SEQ ID NO: 2301 - protein, 217 aa, Artificial Sequence
  Description of Artificial Sequence: Synthetic polypeptide
  Synthetic Construct
APEAAGGPSVFLFPPKPKDTLYITREPEVTCVVVDVSHEDPEVKFNWYVDGVEVHNAKTKPREEQYNSTYRVVSVLTVLHQDWLNGKEYKCKVSNKALPAPIEKTISKAKGQPREPQVYTLPPSRDELTKNQVSLSCAVKGFYPSDIAVEWESYGTEWVNYKTTPPVLDSDGSFFLVSKLTVTKEEWQQGFVFSCSVMHEALHNHYTQKSLSLSPGK

SEQ ID NO: 2302 - protein, 217 aa, Artificial Sequence
  Description of Artificial Sequence: Synthetic polypeptide
  Synthetic Construct
APEAAGGPSVFLFPPKPKDTLYITREPEVTCVVVDVSHEDPEVKFNWYVDGVEVHNAKTKPREEQYNSTYRVVSVLTVLHQDWLNGKEYKCKVSNKALGAPIEKTISKAKGQPREPQVYTLPPSRDELTKNQVSLSCAVKGFYPSDIAVEWESYGTEWVNYKTTPPVLDSDGSFFLVSKLTVTKEEWQQGFVFSCSVMHEALHNHYTQKSLSLSPGK

SEQ ID NO: 2303 - protein, 217 aa, Artificial Sequence
  Description of Artificial Sequence: Synthetic polypeptide
  Synthetic Construct
APELLGGPSVFLFPPKPKDTLMISRTPEVTCVVVDVSHEDPEVKFNWYVDGVEVHNAKTKPREEQYNSTYRVVSVLTVLHQDWLNGKEYKCKVSNKALPAPIEKTISKAKGQPREPQVYTLPPSRDELTKNQVSLWCLVKGFYPSDIAVEWESYGTEWSNYKTTPPVLDSDGSFFLYSKLTVSKEEWQQGFVFSCSVMHEALHNHYTQKSLSLSPGK

SEQ ID NO: 2304 - protein, 217 aa, Artificial Sequence
  Description of Artificial Sequence: Synthetic polypeptide
  Synthetic Construct
APEAAGGPSVFLFPPKPKDTLMISRTPEVTCVVVDVSHEDPEVKFNWYVDGVEVHNAKTKPREEQYNSTYRVVSVLTVLHQDWLNGKEYKCKVSNKALPAPIEKTISKAKGQPREPQVYTLPPSRDELTKNQVSLWCLVKGFYPSDIAVEWESYGTEWSNYKTTPPVLDSDGSFFLYSKLTVSKEEWQQGFVFSCSVMHEALHNHYTQKSLSLSPGK

SEQ ID NO: 2305 - protein, 217 aa, Artificial Sequence
  Description of Artificial Sequence: Synthetic polypeptide
  Synthetic Construct
APEAAGGPSVFLFPPKPKDTLMISRTPEVTCVVVDVSHEDPEVKFNWYVDGVEVHNAKTKPREEQYNSTYRVVSVLTVLHQDWLNGKEYKCKVSNKALGAPIEKTISKAKGQPREPQVYTLPPSRDELTKNQVSLWCLVKGFYPSDIAVEWESYGTEWSNYKTTPPVLDSDGSFFLYSKLTVSKEEWQQGFVFSCSVMHEALHNHYTQKSLSLSPGK

SEQ ID NO: 2306 - protein, 217 aa, Artificial Sequence
  Description of Artificial Sequence: Synthetic polypeptide
  Synthetic Construct
APELLGGPSVFLFPPKPKDTLYITREPEVTCVVVDVSHEDPEVKFNWYVDGVEVHNAKTKPREEQYNSTYRVVSVLTVLHQDWLNGKEYKCKVSNKALPAPIEKTISKAKGQPREPQVYTLPPSRDELTKNQVSLWCLVKGFYPSDIAVEWESYGTEWSNYKTTPPVLDSDGSFFLYSKLTVSKEEWQQGFVFSCSVMHEALHNHYTQKSLSLSPGK

SEQ ID NO: 2307 - protein, 217 aa, Artificial Sequence
  Description of Artificial Sequence: Synthetic polypeptide
  Synthetic Construct
APEAAGGPSVFLFPPKPKDTLYITREPEVTCVVVDVSHEDPEVKFNWYVDGVEVHNAKTKPREEQYNSTYRVVSVLTVLHQDWLNGKEYKCKVSNKALPAPIEKTISKAKGQPREPQVYTLPPSRDELTKNQVSLWCLVKGFYPSDIAVEWESYGTEWSNYKTTPPVLDSDGSFFLYSKLTVSKEEWQQGFVFSCSVMHEALHNHYTQKSLSLSPGK

SEQ ID NO: 2308 - protein, 217 aa, Artificial Sequence
  Description of Artificial Sequence: Synthetic polypeptide
  Synthetic Construct
APEAAGGPSVFLFPPKPKDTLYITREPEVTCVVVDVSHEDPEVKFNWYVDGVEVHNAKTKPREEQYNSTYRVVSVLTVLHQDWLNGKEYKCKVSNKALGAPIEKTISKAKGQPREPQVYTLPPSRDELTKNQVSLWCLVKGFYPSDIAVEWESYGTEWSNYKTTPPVLDSDGSFFLYSKLTVSKEEWQQGFVFSCSVMHEALHNHYTQKSLSLSPGK

SEQ ID NO: 2309 - protein, 217 aa, Artificial Sequence
  Description of Artificial Sequence: Synthetic polypeptide
  Synthetic Construct
APELLGGPSVFLFPPKPKDTLMISRTPEVTCVVVDVSHEDPEVKFNWYVDGVEVHNAKTKPREEQYNSTYRVVSVLTVLHQDWLNGKEYKCKVSNKALPAPIEKTISKAKGQPREPQVYTLPPSRDELTKNQVSLSCAVKGFYPSDIAVEWESYGTEWSNYKTTPPVLDSDGSFFLVSKLTVSKEEWQQGFVFSCSVMHEALHNHYTQKSLSLSPGK

SEQ ID NO: 2310 - protein, 217 aa, Artificial Sequence
  Description of Artificial Sequence: Synthetic polypeptide
  Synthetic Construct
APEAAGGPSVFLFPPKPKDTLMISRTPEVTCVVVDVSHEDPEVKFNWYVDGVEVHNAKTKPREEQYNSTYRVVSVLTVLHQDWLNGKEYKCKVSNKALPAPIEKTISKAKGQPREPQVYTLPPSRDELTKNQVSLSCAVKGFYPSDIAVEWESYGTEWSNYKTTPPVLDSDGSFFLVSKLTVSKEEWQQGFVFSCSVMHEALHNHYTQKSLSLSPGK

SEQ ID NO: 2311 - protein, 217 aa, Artificial Sequence
  Description of Artificial Sequence: Synthetic polypeptide
  Synthetic Construct
APEAAGGPSVFLFPPKPKDTLMISRTPEVTCVVVDVSHEDPEVKFNWYVDGVEVHNAKTKPREEQYNSTYRVVSVLTVLHQDWLNGKEYKCKVSNKALGAPIEKTISKAKGQPREPQVYTLPPSRDELTKNQVSLSCAVKGFYPSDIAVEWESYGTEWSNYKTTPPVLDSDGSFFLVSKLTVSKEEWQQGFVFSCSVMHEALHNHYTQKSLSLSPGK

SEQ ID NO: 2312 - protein, 217 aa, Artificial Sequence
  Description of Artificial Sequence: Synthetic polypeptide
  Synthetic Construct
APELLGGPSVFLFPPKPKDTLYITREPEVTCVVVDVSHEDPEVKFNWYVDGVEVHNAKTKPREEQYNSTYRVVSVLTVLHQDWLNGKEYKCKVSNKALPAPIEKTISKAKGQPREPQVYTLPPSRDELTKNQVSLSCAVKGFYPSDIAVEWESYGTEWSNYKTTPPVLDSDGSFFLVSKLTVSKEEWQQGFVFSCSVMHEALHNHYTQKSLSLSPGK

SEQ ID NO: 2313 - protein, 217 aa, Artificial Sequence
  Description of Artificial Sequence: Synthetic polypeptide
  Synthetic Construct
APEAAGGPSVFLFPPKPKDTLYITREPEVTCVVVDVSHEDPEVKFNWYVDGVEVHNAKTKPREEQYNSTYRVVSVLTVLHQDWLNGKEYKCKVSNKALPAPIEKTISKAKGQPREPQVYTLPPSRDELTKNQVSLSCAVKGFYPSDIAVEWESYGTEWSNYKTTPPVLDSDGSFFLVSKLTVSKEEWQQGFVFSCSVMHEALHNHYTQKSLSLSPGK

SEQ ID NO: 2314 - protein, 217 aa, Artificial Sequence
  Description of Artificial Sequence: Synthetic polypeptide
  Synthetic Construct
APEAAGGPSVFLFPPKPKDTLYITREPEVTCVVVDVSHEDPEVKFNWYVDGVEVHNAKTKPREEQYNSTYRVVSVLTVLHQDWLNGKEYKCKVSNKALGAPIEKTISKAKGQPREPQVYTLPPSRDELTKNQVSLSCAVKGFYPSDIAVEWESYGTEWSNYKTTPPVLDSDGSFFLVSKLTVSKEEWQQGFVFSCSVMHEALHNHYTQKSLSLSPGK

SEQ ID NO: 2315 - protein, 217 aa, Artificial Sequence
  Description of Artificial Sequence: Synthetic polypeptide
  Synthetic Construct
APELLGGPSVFLFPPKPKDTLMISRTPEVTCVVVDVSHEDPEVKFNWYVDGVEVHNAKTKPREEQYNSTYRVVSVLTVLHQDWLNGKEYKCKVSNKALPAPIEKTISKAKGQPREPQVYTLPPSRDELTKNQVSLWCLVKGFYPSDIAVLWESYGTEWASYKTTPPVLDSDGSFFLYSKLTVTKEEWQQGFVFSCSVMHEALHNHYTQKSLSLSPGK

SEQ ID NO: 2316 - protein, 217 aa, Artificial Sequence
  Description of Artificial Sequence: Synthetic polypeptide
  Synthetic Construct
APEAAGGPSVFLFPPKPKDTLMISRTPEVTCVVVDVSHEDPEVKFNWYVDGVEVHNAKTKPREEQYNSTYRVVSVLTVLHQDWLNGKEYKCKVSNKALPAPIEKTISKAKGQPREPQVYTLPPSRDELTKNQVSLWCLVKGFYPSDIAVLWESYGTEWASYKTTPPVLDSDGSFFLYSKLTVTKEEWQQGFVFSCSVMHEALHNHYTQKSLSLSPGK

SEQ ID NO: 2317 - protein, 217 aa, Artificial Sequence
  Description of Artificial Sequence: Synthetic polypeptide
  Synthetic Construct
APEAAGGPSVFLFPPKPKDTLMISRTPEVTCVVVDVSHEDPEVKFNWYVDGVEVHNAKTKPREEQYNSTYRVVSVLTVLHQDWLNGKEYKCKVSNKALGAPIEKTISKAKGQPREPQVYTLPPSRDELTKNQVSLWCLVKGFYPSDIAVLWESYGTEWASYKTTPPVLDSDGSFFLYSKLTVTKEEWQQGFVFSCSVMHEALHNHYTQKSLSLSPGK

SEQ ID NO: 2318 - protein, 217 aa, Artificial Sequence
  Description of Artificial Sequence: Synthetic polypeptide
  Synthetic Construct
APELLGGPSVFLFPPKPKDTLYITREPEVTCVVVDVSHEDPEVKFNWYVDGVEVHNAKTKPREEQYNSTYRVVSVLTVLHQDWLNGKEYKCKVSNKALPAPIEKTISKAKGQPREPQVYTLPPSRDELTKNQVSLWCLVKGFYPSDIAVLWESYGTEWASYKTTPPVLDSDGSFFLYSKLTVTKEEWQQGFVFSCSVMHEALHNHYTQKSLSLSPGK

SEQ ID NO: 2319 - protein, 217 aa, Artificial Sequence
  Description of Artificial Sequence: Synthetic polypeptide
  Synthetic Construct
APEAAGGPSVFLFPPKPKDTLYITREPEVTCVVVDVSHEDPEVKFNWYVDGVEVHNAKTKPREEQYNSTYRVVSVLTVLHQDWLNGKEYKCKVSNKALPAPIEKTISKAKGQPREPQVYTLPPSRDELTKNQVSLWCLVKGFYPSDIAVLWESYGTEWASYKTTPPVLDSDGSFFLYSKLTVTKEEWQQGFVFSCSVMHEALHNHYTQKSLSLSPGK

SEQ ID NO: 2320 - protein, 217 aa, Artificial Sequence
  Description of Artificial Sequence: Synthetic polypeptide
  Synthetic Construct
APEAAGGPSVFLFPPKPKDTLYITREPEVTCVVVDVSHEDPEVKFNWYVDGVEVHNAKTKPREEQYNSTYRVVSVLTVLHQDWLNGKEYKCKVSNKALGAPIEKTISKAKGQPREPQVYTLPPSRDELTKNQVSLWCLVKGFYPSDIAVLWESYGTEWASYKTTPPVLDSDGSFFLYSKLTVTKEEWQQGFVFSCSVMHEALHNHYTQKSLSLSPGK

SEQ ID NO: 2321 - protein, 217 aa, Artificial Sequence
  Description of Artificial Sequence: Synthetic polypeptide
  Synthetic Construct
APELLGGPSVFLFPPKPKDTLMISRTPEVTCVVVDVSHEDPEVKFNWYVDGVEVHNAKTKPREEQYNSTYRVVSVLTVLHQDWLNGKEYKCKVSNKALPAPIEKTISKAKGQPREPQVYTLPPSRDELTKNQVSLSCAVKGFYPSDIAVLWESYGTEWASYKTTPPVLDSDGSFFLVSKLTVTKEEWQQGFVFSCSVMHEALHNHYTQKSLSLSPGK

SEQ ID NO: 2322 - protein, 217 aa, Artificial Sequence
  Description of Artificial Sequence: Synthetic polypeptide
  Synthetic Construct
APEAAGGPSVFLFPPKPKDTLMISRTPEVTCVVVDVSHEDPEVKFNWYVDGVEVHNAKTKPREEQYNSTYRVVSVLTVLHQDWLNGKEYKCKVSNKALPAPIEKTISKAKGQPREPQVYTLPPSRDELTKNQVSLSCAVKGFYPSDIAVLWESYGTEWASYKTTPPVLDSDGSFFLVSKLTVTKEEWQQGFVFSCSVMHEALHNHYTQKSLSLSPGK

SEQ ID NO: 2323 - protein, 217 aa, Artificial Sequence
  Description of Artificial Sequence: Synthetic polypeptide
  Synthetic Construct
APEAAGGPSVFLFPPKPKDTLMISRTPEVTCVVVDVSHEDPEVKFNWYVDGVEVHNAKTKPREEQYNSTYRVVSVLTVLHQDWLNGKEYKCKVSNKALGAPIEKTISKAKGQPREPQVYTLPPSRDELTKNQVSLSCAVKGFYPSDIAVLWESYGTEWASYKTTPPVLDSDGSFFLVSKLTVTKEEWQQGFVFSCSVMHEALHNHYTQKSLSLSPGK

SEQ ID NO: 2324 - protein, 217 aa, Artificial Sequence
  Description of Artificial Sequence: Synthetic polypeptide
  Synthetic Construct
APELLGGPSVFLFPPKPKDTLYITREPEVTCVVVDVSHEDPEVKFNWYVDGVEVHNAKTKPREEQYNSTYRVVSVLTVLHQDWLNGKEYKCKVSNKALPAPIEKTISKAKGQPREPQVYTLPPSRDELTKNQVSLSCAVKGFYPSDIAVLWESYGTEWASYKTTPPVLDSDGSFFLVSKLTVTKEEWQQGFVFSCSVMHEALHNHYTQKSLSLSPGK

SEQ ID NO: 2325 - protein, 217 aa, Artificial Sequence
  Description of Artificial Sequence: Synthetic polypeptide
  Synthetic Construct
APEAAGGPSVFLFPPKPKDTLYITREPEVTCVVVDVSHEDPEVKFNWYVDGVEVHNAKTKPREEQYNSTYRVVSVLTVLHQDWLNGKEYKCKVSNKALPAPIEKTISKAKGQPREPQVYTLPPSRDELTKNQVSLSCAVKGFYPSDIAVLWESYGTEWASYKTTPPVLDSDGSFFLVSKLTVTKEEWQQGFVFSCSVMHEALHNHYTQKSLSLSPGK

SEQ ID NO: 2326 - protein, 217 aa, Artificial Sequence
  Description of Artificial Sequence: Synthetic polypeptide
  Synthetic Construct
APEAAGGPSVFLFPPKPKDTLYITREPEVTCVVVDVSHEDPEVKFNWYVDGVEVHNAKTKPREEQYNSTYRVVSVLTVLHQDWLNGKEYKCKVSNKALGAPIEKTISKAKGQPREPQVYTLPPSRDELTKNQVSLSCAVKGFYPSDIAVLWESYGTEWASYKTTPPVLDSDGSFFLVSKLTVTKEEWQQGFVFSCSVMHEALHNHYTQKSLSLSPGK

SEQ ID NO: 2327 - protein, 217 aa, Artificial Sequence
  Description of Artificial Sequence: Synthetic polypeptide
  Synthetic Construct
APELLGGPSVFLFPPKPKDTLMISRTPEVTCVVVDVSHEDPEVKFNWYVDGVEVHNAKTKPREEQYNSTYRVVSVLTVLHQDWLNGKEYKCKVSNKALPAPIEKTISKAKGQPREPQVYTLPPSRDELTKNQVSLWCLVKGFYPSDIAVEWESYGTEWSNYKTTPPVLDSDGSFFLYSKLTVTKEEWQQGFVFSCSVMHEALHNHYTQKSLSLSPGK

SEQ ID NO: 2328 - protein, 217 aa, Artificial Sequence
  Description of Artificial Sequence: Synthetic polypeptide
  Synthetic Construct
APEAAGGPSVFLFPPKPKDTLMISRTPEVTCVVVDVSHEDPEVKFNWYVDGVEVHNAKTKPREEQYNSTYRVVSVLTVLHQDWLNGKEYKCKVSNKALPAPIEKTISKAKGQPREPQVYTLPPSRDELTKNQVSLWCLVKGFYPSDIAVEWESYGTEWSNYKTTPPVLDSDGSFFLYSKLTVTKEEWQQGFVFSCSVMHEALHNHYTQKSLSLSPGK

SEQ ID NO: 2329 - protein, 217 aa, Artificial Sequence
  Description of Artificial Sequence: Synthetic polypeptide
  Synthetic Construct
APEAAGGPSVFLFPPKPKDTLMISRTPEVTCVVVDVSHEDPEVKFNWYVDGVEVHNAKTKPREEQYNSTYRVVSVLTVLHQDWLNGKEYKCKVSNKALGAPIEKTISKAKGQPREPQVYTLPPSRDELTKNQVSLWCLVKGFYPSDIAVEWESYGTEWSNYKTTPPVLDSDGSFFLYSKLTVTKEEWQQGFVFSCSVMHEALHNHYTQKSLSLSPGK

SEQ ID NO: 2330 - protein, 217 aa, Artificial Sequence
  Description of Artificial Sequence: Synthetic polypeptide
  Synthetic Construct
APELLGGPSVFLFPPKPKDTLYITREPEVTCVVVDVSHEDPEVKFNWYVDGVEVHNAKTKPREEQYNSTYRVVSVLTVLHQDWLNGKEYKCKVSNKALPAPIEKTISKAKGQPREPQVYTLPPSRDELTKNQVSLWCLVKGFYPSDIAVEWESYGTEWSNYKTTPPVLDSDGSFFLYSKLTVTKEEWQQGFVFSCSVMHEALHNHYTQKSLSLSPGK

SEQ ID NO: 2331 - protein, 217 aa, Artificial Sequence
  Description of Artificial Sequence: Synthetic polypeptide
  Synthetic Construct
APEAAGGPSVFLFPPKPKDTLYITREPEVTCVVVDVSHEDPEVKFNWYVDGVEVHNAKTKPREEQYNSTYRVVSVLTVLHQDWLNGKEYKCKVSNKALPAPIEKTISKAKGQPREPQVYTLPPSRDELTKNQVSLWCLVKGFYPSDIAVEWESYGTEWSNYKTTPPVLDSDGSFFLYSKLTVTKEEWQQGFVFSCSVMHEALHNHYTQKSLSLSPGK

SEQ ID NO: 2332 - protein, 217 aa, Artificial Sequence
  Description of Artificial Sequence: Synthetic polypeptide
  Synthetic Construct
APEAAGGPSVFLFPPKPKDTLYITREPEVTCVVVDVSHEDPEVKFNWYVDGVEVHNAKTKPREEQYNSTYRVVSVLTVLHQDWLNGKEYKCKVSNKALGAPIEKTISKAKGQPREPQVYTLPPSRDELTKNQVSLWCLVKGFYPSDIAVEWESYGTEWSNYKTTPPVLDSDGSFFLYSKLTVTKEEWQQGFVFSCSVMHEALHNHYTQKSLSLSPGK

SEQ ID NO: 2333 - protein, 217 aa, Artificial Sequence
  Description of Artificial Sequence: Synthetic polypeptide
  Synthetic Construct
APELLGGPSVFLFPPKPKDTLMISRTPEVTCVVVDVSHEDPEVKFNWYVDGVEVHNAKTKPREEQYNSTYRVVSVLTVLHQDWLNGKEYKCKVSNKALPAPIEKTISKAKGQPREPQVYTLPPSRDELTKNQVSLSCAVKGFYPSDIAVEWESYGTEWSNYKTTPPVLDSDGSFFLVSKLTVTKEEWQQGFVFSCSVMHEALHNHYTQKSLSLSPGK

SEQ ID NO: 2334 - protein, 217 aa, Artificial Sequence
  Description of Artificial Sequence: Synthetic polypeptide
  Synthetic Construct
APEAAGGPSVFLFPPKPKDTLMISRTPEVTCVVVDVSHEDPEVKFNWYVDGVEVHNAKTKPREEQYNSTYRVVSVLTVLHQDWLNGKEYKCKVSNKALPAPIEKTISKAKGQPREPQVYTLPPSRDELTKNQVSLSCAVKGFYPSDIAVEWESYGTEWSNYKTTPPVLDSDGSFFLVSKLTVTKEEWQQGFVFSCSVMHEALHNHYTQKSLSLSPGK

SEQ ID NO: 2335 - protein, 217 aa, Artificial Sequence
  Description of Artificial Sequence: Synthetic polypeptide
  Synthetic Construct
APEAAGGPSVFLFPPKPKDTLMISRTPEVTCVVVDVSHEDPEVKFNWYVDGVEVHNAKTKPREEQYNSTYRVVSVLTVLHQDWLNGKEYKCKVSNKALGAPIEKTISKAKGQPREPQVYTLPPSRDELTKNQVSLSCAVKGFYPSDIAVEWESYGTEWSNYKTTPPVLDSDGSFFLVSKLTVTKEEWQQGFVFSCSVMHEALHNHYTQKSLSLSPGK

SEQ ID NO: 2336 - protein, 217 aa, Artificial Sequence
  Description of Artificial Sequence: Synthetic polypeptide
  Synthetic Construct
APELLGGPSVFLFPPKPKDTLYITREPEVTCVVVDVSHEDPEVKFNWYVDGVEVHNAKTKPREEQYNSTYRVVSVLTVLHQDWLNGKEYKCKVSNKALPAPIEKTISKAKGQPREPQVYTLPPSRDELTKNQVSLSCAVKGFYPSDIAVEWESYGTEWSNYKTTPPVLDSDGSFFLVSKLTVTKEEWQQGFVFSCSVMHEALHNHYTQKSLSLSPGK

SEQ ID NO: 2337 - protein, 217 aa, Artificial Sequence
  Description of Artificial Sequence: Synthetic polypeptide
  Synthetic Construct
APEAAGGPSVFLFPPKPKDTLYITREPEVTCVVVDVSHEDPEVKFNWYVDGVEVHNAKTKPREEQYNSTYRVVSVLTVLHQDWLNGKEYKCKVSNKALPAPIEKTISKAKGQPREPQVYTLPPSRDELTKNQVSLSCAVKGFYPSDIAVEWESYGTEWSNYKTTPPVLDSDGSFFLVSKLTVTKEEWQQGFVFSCSVMHEALHNHYTQKSLSLSPGK

SEQ ID NO: 2338 - protein, 217 aa, Artificial Sequence
  Description of Artificial Sequence: Synthetic polypeptide
  Synthetic Construct
APEAAGGPSVFLFPPKPKDTLYITREPEVTCVVVDVSHEDPEVKFNWYVDGVEVHNAKTKPREEQYNSTYRVVSVLTVLHQDWLNGKEYKCKVSNKALGAPIEKTISKAKGQPREPQVYTLPPSRDELTKNQVSLSCAVKGFYPSDIAVEWESYGTEWSNYKTTPPVLDSDGSFFLVSKLTVTKEEWQQGFVFSCSVMHEALHNHYTQKSLSLSPGK

SEQ ID NO: 2339 - protein, 7 aa, Artificial Sequence
  Description of Artificial Sequence: Synthetic peptide
  Synthetic Construct
  MOD_RES (2)..(2): any amino acid
YXTEWSS

SEQ ID NO: 2340 - protein, 9 aa, Artificial Sequence
  Description of Artificial Sequence: Synthetic peptide
  Synthetic Construct
  MOD_RES (2)..(3): Any amino acid
  MOD_RES (5)..(8): Any amino acid
TXXEXXXXF

SEQ ID NO: 2341 - DNA, 20 bp, Artificial Sequence
  Description of Artificial Sequence: Synthetic oligonucleotide
  Synthetic Construct
ggacagggatccagagttcc

SEQ ID NO: 2342 - DNA, 20 bp, Artificial Sequence
  Description of Artificial Sequence: Synthetic oligonucleotide
  Synthetic Construct
agctgggaaggtgtgcacac

SEQ ID NO: 2343 - DNA, 19 bp, Artificial Sequence
  Description of Artificial Sequence: Synthetic oligonucleotide
  Synthetic Construct
caggggccagtggatagac

SEQ ID NO: 2344 - DNA, 20 bp, Artificial Sequence
  Description of Artificial Sequence: Synthetic oligonucleotide
  Synthetic Construct
gacattgatgtctttggggt

SEQ ID NO: 2345 - DNA, 20 bp, Artificial Sequence
  Description of Artificial Sequence: Synthetic oligonucleotide
  Synthetic Construct
ttcactgccatcaatcttcc

SEQ ID NO: 2346 - protein, 117 aa, Artificial Sequence
  Description of Artificial Sequence: Synthetic polypeptide
  Synthetic Construct
EVQLQQSGPELVKPGASVKMSCKASGYTFTDYNMHWVKQSHGKSLEWIGYINPNNGGTTYNQKFKGKATLTVNKSSSTAYMELRSLTSEDSAVYYCATYNNHYFDSWGQGTTLTVSS

SEQ ID NO: 2347 - protein, 10 aa, Artificial Sequence
  Description of Artificial Sequence: Synthetic peptide
  Synthetic Construct
GYTFTDYNMH

SEQ ID NO: 2348 - protein, 17 aa, Artificial Sequence
  Description of Artificial Sequence: Synthetic peptide
  Synthetic Construct
YINPNNGGTTYNQKFKG

SEQ ID NO: 2349 - protein, 10 aa, Artificial Sequence
  Description of Artificial Sequence: Synthetic peptide
  Synthetic Construct
ATYNNHYFDS

SEQ ID NO: 2350 - protein, 107 aa, Artificial Sequence
  Description of Artificial Sequence: Synthetic polypeptide
  Synthetic Construct
DIQMTQTTSSLSASLGDRVTISCSASQGISNYLNWYQQKPDGTVKLLIYYTSNLHSGVPSRFSGSGSGTDYSLTISNLEPEDIATYYCQQYSNLPYTFGGGTKLEIK

SEQ ID NO: 2351 - protein, 11 aa, Artificial Sequence
  Description of Artificial Sequence: Synthetic peptide
  Synthetic Construct
SASQGISNYLN

SEQ ID NO: 2352 - protein, 7 aa, Artificial Sequence
  Description of Artificial Sequence: Synthetic peptide
  Synthetic Construct
YTSNLHS

SEQ ID NO: 2353 - protein, 9 aa, Artificial Sequence
  Description of Artificial Sequence: Synthetic peptide
  Synthetic Construct
QQYSNLPYT

SEQ ID NO: 2354 - protein, 118 aa, Artificial Sequence
  Description of Artificial Sequence: Synthetic polypeptide
  Synthetic Construct
QVHLQQSGPEVVRPGVSVKISCKGSGYTFTDYGMHWVKQSHAKSLEWIGVISTYNGNTSYNQKYKGKATVTVDKPSSTAYMELVRLTSEDSAIYYCARDFGYVPFDYWGQGTTLTVSS

SEQ ID NO: 2355 - protein, 10 aa, Artificial Sequence
  Description of Artificial Sequence: Synthetic peptide
  Synthetic Construct
GYTFTDYGMH

SEQ ID NO: 2356 - protein, 17 aa, Artificial Sequence
  Description of Artificial Sequence: Synthetic peptide
  Synthetic Construct
VISTYNGNTSYNQKYKG

SEQ ID NO: 2357 - protein, 11 aa, Artificial Sequence
  Description of Artificial Sequence: Synthetic peptide
  Synthetic Construct
ARDFGYVPFDY

SEQ ID NO: 2358 - protein, 112 aa, Artificial Sequence
  Description of Artificial Sequence: Synthetic polypeptide
  Synthetic Construct
DVVMTQTPLTLSVTIGQPASISCKSSQSLLDSDGKTYLNWLLQRPGQSPKRLIYLVSYLDSGVPDRFTGSGSGTDFTLKISRVEADDLGVYYCWQGTHFPYTFGGGTKLEIK

SEQ ID NO: 2359 - protein, 7 aa, Artificial Sequence
  Description of Artificial Sequence: Synthetic peptide
  Synthetic Construct
LVSYLDS

SEQ ID NO: 2360 - protein, 11 aa, Artificial Sequence
  Description of Artificial Sequence: Synthetic peptide
  Synthetic Construct
  MOD_RES (2)..(2): Tyr or Phe
  MOD_RES (3)..(3): Thr, Asn, or Ser
  MOD_RES (4)..(4): Phe, Leu, or Ile
  MOD_RES (5)..(5): Thr, Ser, or Lys
  MOD_RES (6)..(6): Asp, Ser, or Glu
  MOD_RES (7)..(7): Asp or absent
  MOD_RES (8)..(8): His, Tyr, or Thr
  MOD_RES (9)..(9): Ala, Asn, Gly, Val, Trp, Thr or Tyr
  MOD_RES (10)..(10): Met, Ile, or Trp
  MOD_RES (11)..(11): His, Gln, or Asn
GXXXXXXXXXX

SEQ ID NO: 2361 - protein, 11 aa, Artificial Sequence
  Description of Artificial Sequence: Synthetic peptide
  Synthetic Construct
  MOD_RES (3)..(3): Thr or Ser
  MOD_RES (4)..(4): Phe, Leu, or Ile
  MOD_RES (5)..(5): Thr or Ser
  MOD_RES (6)..(6): Asp, Ser, or Glu
  MOD_RES (7)..(7): Asp or absent
  MOD_RES (8)..(8): His or Tyr
  MOD_RES (9)..(9): Ala, Asn, Gly, Val, Trp, Tyr, or Ala
  MOD_RES (10)..(10): Met, Ile, or Trp
  MOD_RES (11)..(11): His, Gln, or Asn
GYXXXXXXXXX

SEQ ID NO: 2362 - protein, 10 aa, Artificial Sequence
  Description of Artificial Sequence: Synthetic peptide
  Synthetic Construct
  MOD_RES (2)..(2): Tyr or Phe
  MOD_RES (3)..(3): Thr or Asn
  MOD_RES (4)..(4): Phe, Leu, or Ile
  MOD_RES (5)..(5): Thr, Ser, or Lys
  MOD_RES (6)..(6): Asp, Ser, or Glu
  MOD_RES (7)..(7): His, Tyr, or Thr
  MOD_RES (8)..(8): Ala, Asn, Gly, Val, Trp, Thr, Tyr, or Ala
  MOD_RES (9)..(9): Met or Ile
  MOD_RES (10)..(10): His or Gln
GXXXXXXXXX

SEQ ID NO: 2363 - protein, 10 aa, Artificial Sequence
  Description of Artificial Sequence: Synthetic peptide
  Synthetic Construct
  MOD_RES (4)..(4): Phe or Leu
  MOD_RES (5)..(5): Thr or Ser
  MOD_RES (6)..(6): Asp, Ser, or Glu
  MOD_RES (7)..(7): His or Tyr
  MOD_RES (8)..(8): Ala, Asn, Gly, Val, Trp, or Thr
  MOD_RES (9)..(9): Met or Ile
  MOD_RES (10)..(10): His or Gln
GYTXXXXXXX

SEQ ID NO: 2364 - protein, 17 aa, Artificial Sequence
  Description of Artificial Sequence: Synthetic peptide
  Synthetic Construct
  MOD_RES (1)..(1): Asp, Val, Tyr, Arg, Gly, or Thr
  MOD_RES (2)..(2): Ile, Ser, or Val
  MOD_RES (3)..(3): Leu, Ser, Asn, Asp, Ile, or Tyr
  MOD_RES (4)..(4): Pro, Thr, or absent
  MOD_RES (5)..(5): Ser, Tyr, Asn, Thr, Ala, Gly, or Phe
  MOD_RES (6)..(6): Ile, Ser, Asn, Thr, or Asp
  MOD_RES (7)..(7): Gly or Asp
  MOD_RES (8)..(8): Gly, Asp, Asn, Arg, or Ser
  MOD_RES (9)..(9): Arg, Thr, or Ala
  MOD_RES (10)..(10): Ile, Gly, Ser, Lys, Thr, Asn, or Arg
  MOD_RES (12)..(12): Gly, Asn, Asp, or Thr
  MOD_RES (13)..(13): Val, Gln, Glu, or Pro
  MOD_RES (14)..(14): Lys or Ser
  MOD_RES (15)..(15): Phe, Tyr or Leu
  MOD_RES (16)..(16): Lys, Arg, Gln, or is absent
  MOD_RES (17)..(17): Gly, Thr, Asp, Ser, or is absent
XXXXXXXXXXYXXXXXX

SEQ ID NO: 2365 - protein, 17 aa, Artificial Sequence
  Description of Artificial Sequence: Synthetic peptide
  Synthetic Construct
  MOD_RES (1)..(1): Val, Tyr, Arg, Gly, or Thr
  MOD_RES (2)..(2): Ile, Ser, or Val
  MOD_RES (3)..(3): Ser, Asn, Asp, Ile, or Tyr
  MOD_RES (4)..(4): Pro, Thr, or absent
  MOD_RES (5)..(5): Tyr, Asn, Thr, Ala, Gly, or Phe
  MOD_RES (6)..(6): Ser, Asn, Thr, or Asp
  MOD_RES (7)..(7): Gly or Asp
  MOD_RES (8)..(8): Gly, Asp, Asn, Arg, or Ser
  MOD_RES (9)..(9): Thr or Ala
  MOD_RES (10)..(10): Ile, Gly, Ser, Lys, Thr, Asn, or Arg
  MOD_RES (12)..(12): Asn, Asp, or Thr
  MOD_RES (13)..(13): Gln, Glu, or Pro
  MOD_RES (14)..(14): Lys or Ser
  MOD_RES (15)..(15): Phe, Tyr or Leu
  MOD_RES (16)..(16): Lys, Arg, or Gln
  MOD_RES (17)..(17): Gly, Thr, Asp, or Ser
XXXXXXXXXXYXXXXXX

SEQ ID NO: 2366 - protein, 17 aa, Artificial Sequence
  Description of Artificial Sequence: Synthetic peptide
  Synthetic Construct
  MOD_RES (1)..(1): Val, Tyr, Arg, Gly, or Thr
  MOD_RES (2)..(2): Ile, Ser, or Val
  MOD_RES (3)..(3): Ser, Asn, Asp, Ile, or Tyr
  MOD_RES (4)..(4): Pro or Thr
  MOD_RES (5)..(5): Tyr, Asn, Thr, Ala, or Gly
  MOD_RES (6)..(6): Ser, Asn, Thr, or Asp
  MOD_RES (7)..(7): Gly or Asp
  MOD_RES (8)..(8): Gly, Asp, or Asn
  MOD_RES (9)..(9): Thr or Ala
  MOD_RES (10)..(10): Gly, Ser, Lys, Thr, Asn, or Arg
  MOD_RES (12)..(12): Asn, Asp, or Thr
  MOD_RES (13)..(13): Gln, Glu, or Pro
  MOD_RES (15)..(15): Phe or Tyr
  MOD_RES (16)..(16): Lys, Arg, or Gln
  MOD_RES (17)..(17): Gly, Thr, or Asp
XXXXXXXXXXYXXKXXX

SEQ ID NO: 2367 - protein, 15 aa, Artificial Sequence
  Description of Artificial Sequence: Synthetic peptide
  Synthetic Construct
  MOD_RES (3)..(3): Gly or Asn
  MOD_RES (4)..(4): Asp or Gly
  MOD_RES (5)..(5): Asp or Ile
  MOD_RES (6)..(6): Ser or Thr
  MOD_RES (7)..(7): Tyr or Thr
  MOD_RES (8)..(8): Arg or Ala
  MOD_RES (9)..(9): Arg or Gly
  MOD_RES (10)..(10): Gly or Tyr
  MOD_RES (13)..(13): Leu or Met
ARXXXXXXXXYAXDY

SEQ ID NO: 2368 - protein, 17 aa, Artificial Sequence
  Description of Artificial Sequence: Synthetic peptide
  Synthetic Construct
  MOD_RES (1)..(1): Arg or Lys
  MOD_RES (4)..(4): Gln or Lys
  MOD_RES (7)..(7): Val or Leu
  MOD_RES (8)..(8): His, Asp, or Tyr
  MOD_RES (9)..(9): Ile, Asn, or Ser
  MOD_RES (10)..(10): Ser or absent
  MOD_RES (11)..(11): Asp or Asn
  MOD_RES (12)..(12): Gly or Gln
  MOD_RES (13)..(13): Asn, Ile, or Lys
  MOD_RES (14)..(14): Thr or Ser
  MOD_RES (15)..(15): Tyr or Phe
  MOD_RES (17)..(17): Gln, His, Tyr, Asn, or Ala
XSSXSLXXXXXXXXXLX

SEQ ID NO: 2369 - protein, 11 aa, Artificial Sequence
  Description of Artificial Sequence: Synthetic peptide
  Synthetic Construct
  MOD_RES (1)..(1): Arg, Lys, or Ser
  MOD_RES (4)..(4): Glu or Gln
  MOD_RES (5)..(5): Asn, Asp, or Gly
  MOD_RES (7)..(7): Tyr or Ser
  MOD_RES (8)..(8): Ser or Asn
  MOD_RES (9)..(9): Asn, Arg, or Tyr
  MOD_RES (11)..(11): Ala or Asn
XASXXIXXXLX

SEQ ID NO: 2370 - protein, 7 aa, Artificial Sequence
  Description of Artificial Sequence: Synthetic peptide
  Synthetic Construct
  MOD_RES (1)..(1): Lys, Gln, Tyr, Val, or Leu
  MOD_RES (2)..(2): Val, Met, or Thr
  MOD_RES (4)..(4): Asn, Lys, or Tyr
  MOD_RES (5)..(5): Arg or Leu
  MOD_RES (6)..(6): Phe, Ala, His, or Asp
XXSXXXS

SEQ ID NO: 2371 - protein, 9 aa, Artificial Sequence
  Description of Artificial Sequence: Synthetic peptide
  Synthetic Construct
  MOD_RES (1)..(1): Ser, Trp, or Gln
  MOD_RES (2)..(2): Gln or His
  MOD_RES (3)..(3): Ser, Thr, Gly, Tyr, or Phe
  MOD_RES (4)..(4): Thr, Phe, Trp, or Ser
  MOD_RES (5)..(5): His, Ser, Gly, or Asn
  MOD_RES (6)..(6): Val, Ala, Phe, Tyr, Thr, or Leu
  MOD_RES (7)..(7): Pro, Thr, or Leu
  MOD_RES (8)..(8): Tyr, Phe, Pro, or Trp
XXXXXXXXT

SEQ ID NO: 2372 - protein, 9 aa, Artificial Sequence
  Description of Artificial Sequence: Synthetic peptide
  Synthetic Construct
  MOD_RES (2)..(2): Gln or His
  MOD_RES (3)..(3): Tyr or Phe
  MOD_RES (4)..(4): Phe, Trp, or Ser
  MOD_RES (5)..(5): Ser, Gly, or Asn
  MOD_RES (6)..(6): Tyr, Thr, or Leu
  MOD_RES (8)..(8): Pro, Tyr, or Trp
QXXXXXPXT

SEQ ID NO: 2373 - protein, 159 aa, Homo sapiens
SGAHNTTVFQGVAGQSLQVSCPYDSMKHWGRRKAWCRQLGEKGPCQRVVSTHNLWLLSFLRRWNGSTAITDDTLGGTLTITLRNLQPHDAGLYQCQSLHGSEADTLRKVLVEVLADPLDHRDAGDLWFPGESESFEDAHVEHSISRSLLEGEIPFPPTS

SEQ ID NO: 2374 - protein, 10 aa, Homo sapiens
DLWFPGESES

SEQ ID NO: 2375 - protein, 9 aa, Homo sapiens
DLWFPGESE

SEQ ID NO: 2376 - protein, 5 aa, Homo sapiens
DLWFP

SEQ ID NO: 2377 - protein, 217 aa, Artificial Sequence
  Description of Artificial Sequence: Synthetic polypeptide
  Synthetic Construct
APELLGGPSVFLFPPKPKDTLMISRTPEVTCVVVDVSHEDPEVKFNWYVDGVEVHNAKTKPREEQYNSTYRVVSVLTVLHQDWLNGKEYKCKVSNKALPAPIEKTISKAKGQPREPQVYTLPPSRDELTKNQVSLTCLVKGFYPSDIAVEWESWGFVWSTYKTTPPVLDSDGSFFLYSKLTVPKSNWQQGFVFSCSVMHEALHNHYTQKSLSLSPGK

SEQ ID NO: 2378 - protein, 217 aa, Artificial Sequence
  Description of Artificial Sequence: Synthetic polypeptide
  Synthetic Construct
APELLGGPSVFLFPPKPKDTLMISRTPEVTCVVVDVSHEDPEVKFNWYVDGVEVHNAKTKPREEQYNSTYRVVSVLTVLHQDWLNGKEYKCKVSNKALPAPIEKTISKAKGQPREPQVYTLPPSRDELTKNQVSLTCLVKGFYPSDIAVEWESWGHVWSTYKTTPPVLDSDGSFFLYSKLTVPKSNWQQGYVFSCSVMHEALHNHYTQKSLSLSPGK

SEQ ID NO: 2379 - protein, 217 aa, Artificial Sequence
  Description of Artificial Sequence: Synthetic polypeptide
  Synthetic Construct
APELLGGPSVFLFPPKPKDTLMISRTPEVTCVVVDVSHEDPEVKFNWYVDGVEVHNAKTKPREEQYNSTYRVVSVLTVLHQDWLNGKEYKCKVSNKALPAPIEKTISKAKGQPREPQVYTLPPSRDELTKNQVSLTCLVKGFYPSDIAVEWESLGHVWVEQKTTPPVLDSDGSFFLYSKLTVPKSTWQQGWVFSCSVMHEALHNHYTQKSLSLSPGK

SEQ ID NO: 2380 - protein, 217 aa, Artificial Sequence
  Description of Artificial Sequence: Synthetic polypeptide
  Synthetic Construct
APELLGGPSVFLFPPKPKDTLMISRTPEVTCVVVDVSHEDPEVKFNWYVDGVEVHNAKTKPREEQYNSTYRVVSVLTVLHQDWLNGKEYKCKVSNKALPAPIEKTISKAKGQPREPQVYTLPPSRDELTKNQVSLTCLVKGFYPSDIAVEWESLGHVWVGVKTTPPVLDSDGSFFLYSKLTVPKSTWQQGWVFSCSVMHEALHNHYTQKSLSLSPGK

SEQ ID NO: 2381 - protein, 217 aa, Artificial Sequence
  Description of Artificial Sequence: Synthetic polypeptide
  Synthetic Construct
APELLGGPSVFLFPPKPKDTLMISRTPEVTCVVVDVSHEDPEVKFNWYVDGVEVHNAKTKPREEQYNSTYRVVSVLTVLHQDWLNGKEYKCKVSNKALPAPIEKTISKAKGQPREPQVYTLPPSRDELTKNQVSLTCLVKGFYPSDIAVEWESLGHVWVHTKTTPPVLDSDGSFFLYSKLTVPKSTWQQGWVFSCSVMHEALHNHYTQKSLSLSPGK

SEQ ID NO: 2382 - protein, 217 aa, Artificial Sequence
  Description of Artificial Sequence: Synthetic polypeptide
  Synthetic Construct
APELLGGPSVFLFPPKPKDTLMISRTPEVTCVVVDVSHEDPEVKFNWYVDGVEVHNAKTKPREEQYNSTYRVVSVLTVLHQDWLNGKEYKCKVSNKALPAPIEKTISKAKGQPREPQVYTLPPSRDELTKNQVSLTCLVKGFYPSDIAVEWESWGTVWGTYKTTPPVLDSDGSFFLYSKLTVPKSNWQQGYVFSCSVMHEALHNHYTQKSLSLSPGK

SEQ ID NO: 2383 - protein, 217 aa, Artificial Sequence
  Description of Artificial Sequence: Synthetic polypeptide
  Synthetic Construct
APELLGGPSVFLFPPKPKDTLMISRTPEVTCVVVDVSHEDPEVKFNWYVDGVEVHNAKTKPREEQYNSTYRVVSVLTVLHQDWLNGKEYKCKVSNKALPAPIEKTISKAKGQPREPQVYTLPPSRDELTKNQVSLTCLVKGFYPSDIAVEWESLGHVWVGTKTTPPVLDSDGSFFLYSKLTVPKSTWQQGWVFSCSVMHEALHNHYTQKSLSLSPGK

SEQ ID NO: 2384 - protein, 217 aa, Artificial Sequence
  Description of Artificial Sequence: Synthetic polypeptide
  Synthetic Construct
APELLGGPSVFLFPPKPKDTLMISRTPEVTCVVVDVSHEDPEVKFNWYVDGVEVHNAKTKPREEQYNSTYRVVSVLTVLHQDWLNGKEYKCKVSNKALPAPIEKTISKAKGQPREPQVYTLPPSRDELTKNQVSLTCLVKGFYPSDIAVEWESFGTEWSSYKTTPPVLDSDGSFFLYSKLTVSKEEWQQGFVFSCSVMHEALHNHYTQKSLSLSPGK

SEQ ID NO: 2385 - protein, 217 aa, Artificial Sequence
  Description of Artificial Sequence: Synthetic polypeptide
  Synthetic Construct
APELLGGPSVFLFPPKPKDTLMISRTPEVTCVVVDVSHEDPEVKFNWYVDGVEVHNAKTKPREEQYNSTYRVVSVLTVLHQDWLNGKEYKCKVSNKALPAPIEKTISKAKGQPREPQVYTLPPSRDELTKNQVSLTCLVKGFYPSDIAVEWESYGTEWANYKTTPPVLDSDGSFFLYSKLTVSKSEWQQGFVFSCSVMHEALHNHYTQKSLSLSPGK

SEQ ID NO: 2386 - protein, 217 aa, Artificial Sequence
  Description of Artificial Sequence: Synthetic polypeptide
  Synthetic Construct
APELLGGPSVFLFPPKPKDTLMISRTPEVTCVVVDVSHEDPEVKFNWYVDGVEVHNAKTKPREEQYNSTYRVVSVLTVLHQDWLNGKEYKCKVSNKALPAPIEKTISKAKGQPREPQVYTLPPSRDELTKNQVSLTCLVKGFYPSDIAVEWESFGTEWSNYKTTPPVLDSDGSFFLYSKLTVSKEEWQQGFVFSCSVMHEALHNHYTQKSLSLSPGK

SEQ ID NO: 2387 - protein, 217 aa, Artificial Sequence
  Description of Artificial Sequence: Synthetic polypeptide
  Synthetic Construct
APELLGGPSVFLFPPKPKDTLMISRTPEVTCVVVDVSHEDPEVKFNWYVDGVEVHNAKTKPREEQYNSTYRVVSVLTVLHQDWLNGKEYKCKVSNKALPAPIEKTISKAKGQPREPQVYTLPPSRDELTKNQVSLTCLVKGFYPSDIAVEWESYGTEWSSYKTTPPVLDSDGSFFLYSKLTVSKSEWQQGFVFSCSVMHEALHNHYTQKSLSLSPGK

SEQ ID NO: 2388 - protein, 217 aa, Artificial Sequence
  Description of Artificial Sequence: Synthetic polypeptide
  Synthetic Construct
APELLGGPSVFLFPPKPKDTLMISRTPEVTCVVVDVSHEDPEVKFNWYVDGVEVHNAKTKPREEQYNSTYRVVSVLTVLHQDWLNGKEYKCKVSNKALPAPIEKTISKAKGQPREPQVYTLPPSRDELTKNQVSLTCLVKGFYPSDIAVEWESYGTEWVNYKTTPPVLDSDGSFFLYSKLTVSKEEWQQGFVFSCSVMHEALHNHYTQKSLSLSPGK

SEQ ID NO: 2389 - protein, 217 aa, Artificial Sequence; identical to SEQ ID NO: 2187
  Description of Artificial Sequence: Synthetic polypeptide
  Synthetic Construct

SEQ ID NO: 2390 - protein, 217 aa, Artificial Sequence
  Description of Artificial Sequence: Synthetic polypeptide
  Synthetic Construct
APELLGGPSVFLFPPKPKDTLMISRTPEVTCVVVDVSHEDPEVKFNWYVDGVEVHNAKTKPREEQYNSTYRVVSVLTVLHQDWLNGKEYKCKVSNKALPAPIEKTISKAKGQPREPQVYTLPPSRDELTKNQVSLTCLVKGFYPSDIAVEWESFGTEWVNYKTTPPVLDSDGSFFLYSKLTVSKEEWQQGFVFSCSVMHEALHNHYTQKSLSLSPGK

SEQ ID NO: 2391 - protein, 217 aa, Artificial Sequence
  Description of Artificial Sequence: Synthetic polypeptide
  Synthetic Construct
APEAAGGPSVFLFPPKPKDTLMISRTPEVTCVVVDVSHEDPEVKFNWYVDGVEVHNAKTKPREEQYNSTYRVVSVLTVLHQDWLNGKEYKCKVSNKALGAPIEKTISKAKGQPREPQVYTLPPSRDELTKNQVSLWCLVKGFYPSDIAVWWESYGTEWSSYKTTPPVLDSDGSFFLYSKLTVTKEEWQQGFVFSCSVMHEALHNHYTQKSLSLSPGK

SEQ ID NO: 2392 - protein, 217 aa, Artificial Sequence
  Description of Artificial Sequence: Synthetic polypeptide
  Synthetic Construct
APEAAGGPSVFLFPPKPKDTLYITREPEVTCVVVDVSHEDPEVKFNWYVDGVEVHNAKTKPREEQYNSTYRVVSVLTVLHQDWLNGKEYKCKVSNKALGAPIEKTISKAKGQPREPQVYTLPPSRDELTKNQVSLWCLVKGFYPSDIAVWWESYGTEWSSYKTTPPVLDSDGSFFLYSKLTVTKEEWQQGFVFSCSVMHEALHNHYTQKSLSLSPGK

SEQ ID NO: 2393 - protein, 217 aa, Artificial Sequence
  Description of Artificial Sequence: Synthetic polypeptide
  Synthetic Construct
APEAAGGPSVFLFPPKPKDTLMISRTPEVTCVVVDVSHEDPEVKFNWYVDGVEVHNAKTKPREEQYNSTYRVVSVLTVLHQDWLNGKEYKCKVSNKALGAPIEKTISKAKGQPREPQVYTLPPSRDELTKNQVSLSCAVKGFYPSDIAVWWESYGTEWSSYKTTPPVLDSDGSFFLVSKLTVTKEEWQQGFVFSCSVMHEALHNHYTQKSLSLSPGK

SEQ ID NO: 2394 - protein, 217 aa, Artificial Sequence
  Description of Artificial Sequence: Synthetic polypeptide
  Synthetic Construct
APEAAGGPSVFLFPPKPKDTLYITREPEVTCVVVDVSHEDPEVKFNWYVDGVEVHNAKTKPREEQYNSTYRVVSVLTVLHQDWLNGKEYKCKVSNKALGAPIEKTISKAKGQPREPQVYTLPPSRDELTKNQVSLSCAVKGFYPSDIAVWWESYGTEWSSYKTTPPVLDSDGSFFLVSKLTVTKEEWQQGFVFSCSVMHEALHNHYTQKSLSLSPGK

SEQ ID NO: 2395 - protein, 217 aa, Artificial Sequence
  Description of Artificial Sequence: Synthetic polypeptide
  Synthetic Construct
APELLGGPSVFLFPPKPKDTLMISRTPEVTCVVVDVSHEDPEVKFNWYVDGVEVHNAKTKPREEQYNSTYRVVSVLTVLHQDWLNGKEYKCKVSNKALPAPIEKTISKAKGQPREPQVYTLPPSRDELTKNQVSLWCLVKGFYPSDIAVEWESFGTEWSSYKTTPPVLDSDGSFFLYSKLTVSKEEWQQGFVFSCSVMHEALHNHYTQKSLSLSPGK

SEQ ID NO: 2396 - protein, 217 aa, Artificial Sequence
  Description of Artificial Sequence: Synthetic polypeptide
  Synthetic Construct
APEAAGGPSVFLFPPKPKDTLMISRTPEVTCVVVDVSHEDPEVKFNWYVDGVEVHNAKTKPREEQYNSTYRVVSVLTVLHQDWLNGKEYKCKVSNKALPAPIEKTISKAKGQPREPQVYTLPPSRDELTKNQVSLWCLVKGFYPSDIAVEWESFGTEWSSYKTTPPVLDSDGSFFLYSKLTVSKEEWQQGFVFSCSVMHEALHNHYTQKSLSLSPGK

SEQ ID NO: 2397 - protein, 217 aa, Artificial Sequence
  Description of Artificial Sequence: Synthetic polypeptide
  Synthetic Construct
APEAAGGPSVFLFPPKPKDTLMISRTPEVTCVVVDVSHEDPEVKFNWYVDGVEVHNAKTKPREEQYNSTYRVVSVLTVLHQDWLNGKEYKCKVSNKALGAPIEKTISKAKGQPREPQVYTLPPSRDELTKNQVSLWCLVKGFYPSDIAVEWESFGTEWSSYKTTPPVLDSDGSFFLYSKLTVSKEEWQQGFVFSCSVMHEALHNHYTQKSLSLSPGK

SEQ ID NO: 2398 - protein, 217 aa, Artificial Sequence
  Description of Artificial Sequence: Synthetic polypeptide
  Synthetic Construct
APELLGGPSVFLFPPKPKDTLYITREPEVTCVVVDVSHEDPEVKFNWYVDGVEVHNAKTKPREEQYNSTYRVVSVLTVLHQDWLNGKEYKCKVSNKALPAPIEKTISKAKGQPREPQVYTLPPSRDELTKNQVSLWCLVKGFYPSDIAVEWESFGTEWSSYKTTPPVLDSDGSFFLYSKLTVSKEEWQQGFVFSCSVMHEALHNHYTQKSLSLSPGK

SEQ ID NO: 2399 - protein, 217 aa, Artificial Sequence
  Description of Artificial Sequence: Synthetic polypeptide
  Synthetic Construct
APEAAGGPSVFLFPPKPKDTLYITREPEVTCVVVDVSHEDPEVKFNWYVDGVEVHNAKTKPREEQYNSTYRVVSVLTVLHQDWLNGKEYKCKVSNKALPAPIEKTISKAKGQPREPQVYTLPPSRDELTKNQVSLWCLVKGFYPSDIAVEWESFGTEWSSYKTTPPVLDSDGSFFLYSKLTVSKEEWQQGFVFSCSVMHEALHNHYTQKSLSLSPGK

SEQ ID NO: 2400 - protein, 217 aa, Artificial Sequence
  Description of Artificial Sequence: Synthetic polypeptide
  Synthetic Construct
APEAAGGPSVFLFPPKPKDTLYITREPEVTCVVVDVSHEDPEVKFNWYVDGVEVHNAKTKPREEQYNSTYRVVSVLTVLHQDWLNGKEYKCKVSNKALGAPIEKTISKAKGQPREPQVYTLPPSRDELTKNQVSLWCLVKGFYPSDIAVEWESFGTEWSSYKTTPPVLDSDGSFFLYSKLTVSKEEWQQGFVFSCSVMHEALHNHYTQKSLSLSPGK

SEQ ID NO: 2401 - protein, 217 aa, Artificial Sequence
  Description of Artificial Sequence: Synthetic polypeptide
  Synthetic Construct
APELLGGPSVFLFPPKPKDTLMISRTPEVTCVVVDVSHEDPEVKFNWYVDGVEVHNAKTKPREEQYNSTYRVVSVLTVLHQDWLNGKEYKCKVSNKALPAPIEKTISKAKGQPREPQVYTLPPSRDELTKNQVSLSCAVKGFYPSDIAVEWESFGTEWSSYKTTPPVLDSDGSFFLVSKLTVSKEEWQQGFVFSCSVMHEALHNHYTQKSLSLSPGK

SEQ ID NO: 2402 - protein, 217 aa, Artificial Sequence
  Description of Artificial Sequence: Synthetic polypeptide
  Synthetic Construct
APEAAGGPSVFLFPPKPKDTLMISRTPEVTCVVVDVSHEDPEVKFNWYVDGVEVHNAKTKPREEQYNSTYRVVSVLTVLHQDWLNGKEYKCKVSNKALPAPIEKTISKAKGQPREPQVYTLPPSRDELTKNQVSLSCAVKGFYPSDIAVEWESFGTEWSSYKTTPPVLDSDGSFFLVSKLTVSKEEWQQGFVFSCSVMHEALHNHYTQKSLSLSPGK

SEQ ID NO: 2403 - protein, 217 aa, Artificial Sequence
  Description of Artificial Sequence: Synthetic polypeptide
  Synthetic Construct
APEAAGGPSVFLFPPKPKDTLMISRTPEVTCVVVDVSHEDPEVKFNWYVDGVEVHNAKTKPREEQYNSTYRVVSVLTVLHQDWLNGKEYKCKVSNKALGAPIEKTISKAKGQPREPQVYTLPPSRDELTKNQVSLSCAVKGFYPSDIAVEWESFGTEWSSYKTTPPVLDSDGSFFLVSKLTVSKEEWQQGFVFSCSVMHEALHNHYTQKSLSLSPGK

SEQ ID NO: 2404 - protein, 217 aa, Artificial Sequence
  Description of Artificial Sequence: Synthetic polypeptide
  Synthetic Construct
APELLGGPSVFLFPPKPKDTLYITREPEVTCVVVDVSHEDPEVKFNWYVDGVEVHNAKTKPREEQYNSTYRVVSVLTVLHQDWLNGKEYKCKVSNKALPAPIEKTISKAKGQPREPQVYTLPPSRDELTKNQVSLSCAVKGFYPSDIAVEWESFGTEWSSYKTTPPVLDSDGSFFLVSKLTVSKEEWQQGFVFSCSVMHEALHNHYTQKSLSLSPGK

SEQ ID NO: 2405 - protein, 217 aa, Artificial Sequence
  Description of Artificial Sequence: Synthetic polypeptide
  Synthetic Construct
APEAAGGPSVFLFPPKPKDTLYITREPEVTCVVVDVSHEDPEVKFNWYVDGVEVHNAKTKPREEQYNSTYRVVSVLTVLHQDWLNGKEYKCKVSNKALPAPIEKTISKAKGQPREPQVYTLPPSRDELTKNQVSLSCAVKGFYPSDIAVEWESFGTEWSSYKTTPPVLDSDGSFFLVSKLTVSKEEWQQGFVFSCSVMHEALHNHYTQKSLSLSPGK

SEQ ID NO: 2406 - protein, 217 aa, Artificial Sequence
  Description of Artificial Sequence: Synthetic polypeptide
  Synthetic Construct
APEAAGGPSVFLFPPKPKDTLYITREPEVTCVVVDVSHEDPEVKFNWYVDGVEVHNAKTKPREEQYNSTYRVVSVLTVLHQDWLNGKEYKCKVSNKALGAPIEKTISKAKGQPREPQVYTLPPSRDELTKNQVSLSCAVKGFYPSDIAVEWESFGTEWSSYKTTPPVLDSDGSFFLVSKLTVSKEEWQQGFVFSCSVMHEALHNHYTQKSLSLSPGK

SEQ ID NO: 2407 - protein, 217 aa, Artificial Sequence
  Description of Artificial Sequence: Synthetic polypeptide
  Synthetic Construct
APELLGGPSVFLFPPKPKDTLMISRTPEVTCVVVDVSHEDPEVKFNWYVDGVEVHNAKTKPREEQYNSTYRVVSVLTVLHQDWLNGKEYKCKVSNKALPAPIEKTISKAKGQPREPQVYTLPPSRDELTKNQVSLWCLVKGFYPSDIAVEWESYGTEWANYKTTPPVLDSDGSFFLYSKLTVSKSEWQQGFVFSCSVMHEALHNHYTQKSLSLSPGK

SEQ ID NO: 2408 - protein, 217 aa, Artificial Sequence
  Description of Artificial Sequence: Synthetic polypeptide
  Synthetic Construct
APEAAGGPSVFLFPPKPKDTLMISRTPEVTCVVVDVSHEDPEVKFNWYVDGVEVHNAKTKPREEQYNSTYRVVSVLTVLHQDWLNGKEYKCKVSNKALPAPIEKTISKAKGQPREPQVYTLPPSRDELTKNQVSLWCLVKGFYPSDIAVEWESYGTEWANYKTTPPVLDSDGSFFLYSKLTVSKSEWQQGFVFSCSVMHEALHNHYTQKSLSLSPGK

SEQ ID NO: 2409 - protein, 217 aa, Artificial Sequence
  Description of Artificial Sequence: Synthetic polypeptide
  Synthetic Construct
APEAAGGPSVFLFPPKPKDTLMISRTPEVTCVVVDVSHEDPEVKFNWYVDGVEVHNAKTKPREEQYNSTYRVVSVLTVLHQDWLNGKEYKCKVSNKALGAPIEKTISKAKGQPREPQVYTLPPSRDELTKNQVSLWCLVKGFYPSDIAVEWESYGTEWANYKTTPPVLDSDGSFFLYSKLTVSKSEWQQGFVFSCSVMHEALHNHYTQKSLSLSPGK

SEQ ID NO: 2410 - protein, 217 aa, Artificial Sequence
  Description of Artificial Sequence: Synthetic polypeptide
  Synthetic Construct
APELLGGPSVFLFPPKPKDTLYITREPEVTCVVVDVSHEDPEVKFNWYVDGVEVHNAKTKPREEQYNSTYRVVSVLTVLHQDWLNGKEYKCKVSNKALPAPIEKTISKAKGQPREPQVYTLPPSRDELTKNQVSLWCLVKGFYPSDIAVEWESYGTEWANYKTTPPVLDSDGSFFLYSKLTVSKSEWQQGFVFSCSVMHEALHNHYTQKSLSLSPGK

SEQ ID NO: 2411 - protein, 217 aa, Artificial Sequence
  Description of Artificial Sequence: Synthetic polypeptide
  Synthetic Construct
APEAAGGPSVFLFPPKPKDTLYITREPEVTCVVVDVSHEDPEVKFNWYVDGVEVHNAKTKPREEQYNSTYRVVSVLTVLHQDWLNGKEYKCKVSNKALPAPIEKTISKAKGQPREPQVYTLPPSRDELTKNQVSLWCLVKGFYPSDIAVEWESYGTEWANYKTTPPVLDSDGSFFLYSKLTVSKSEWQQGFVFSCSVMHEALHNHYTQKSLSLSPGK

SEQ ID NO: 2412 - protein, 217 aa, Artificial Sequence
  Description of Artificial Sequence: Synthetic polypeptide
  Synthetic Construct
APEAAGGPSVFLFPPKPKDTLYITREPEVTCVVVDVSHEDPEVKFNWYVDGVEVHNAKTKPREEQYNSTYRVVSVLTVLHQDWLNGKEYKCKVSNKALGAPIEKTISKAKGQPREPQVYTLPPSRDELTKNQVSLWCLVKGFYPSDIAVEWESYGTEWANYKTTPPVLDSDGSFFLYSKLTVSKSEWQQGFVFSCSVMHEALHNHYTQKSLSLSPGK

SEQ ID NO: 2413 - protein, 217 aa, Artificial Sequence
  Description of Artificial Sequence: Synthetic polypeptide
  Synthetic Construct
APELLGGPSVFLFPPKPKDTLMISRTPEVTCVVVDVSHEDPEVKFNWYVDGVEVHNAKTKPREEQYNSTYRVVSVLTVLHQDWLNGKEYKCKVSNKALPAPIEKTISKAKGQPREPQVYTLPPSRDELTKNQVSLSCAVKGFYPSDIAVEWESYGTEWANYKTTPPVLDSDGSFFLVSKLTVSKSEWQQGFVFSCSVMHEALHNHYTQKSLSLSPGK

SEQ ID NO: 2414 - protein, 217 aa, Artificial Sequence
  Description of Artificial Sequence: Synthetic polypeptide
  Synthetic Construct
APEAAGGPSVFLFPPKPKDTLMISRTPEVTCVVVDVSHEDPEVKFNWYVDGVEVHNAKTKPREEQYNSTYRVVSVLTVLHQDWLNGKEYKCKVSNKALPAPIEKTISKAKGQPREPQVYTLPPSRDELTKNQVSLSCAVKGFYPSDIAVEWESYGTEWANYKTTPPVLDSDGSFFLVSKLTVSKSEWQQGFVFSCSVMHEALHNHYTQKSLSLSPGK

SEQ ID NO: 2415 - protein, 217 aa, Artificial Sequence
  Description of Artificial Sequence: Synthetic polypeptide
  Synthetic Construct
APEAAGGPSVFLFPPKPKDTLMISRTPEVTCVVVDVSHEDPEVKFNWYVDGVEVHNAKTKPREEQYNSTYRVVSVLTVLHQDWLNGKEYKCKVSNKALGAPIEKTISKAKGQPREPQVYTLPPSRDELTKNQVSLSCAVKGFYPSDIAVEWESYGTEWANYKTTPPVLDSDGSFFLVSKLTVSKSEWQQGFVFSCSVMHEALHNHYTQKSLSLSPGK

SEQ ID NO: 2416 - protein, 217 aa, Artificial Sequence
  Description of Artificial Sequence: Synthetic polypeptide
  Synthetic Construct
APELLGGPSVFLFPPKPKDTLYITREPEVTCVVVDVSHEDPEVKFNWYVDGVEVHNAKTKPREEQYNSTYRVVSVLTVLHQDWLNGKEYKCKVSNKALPAPIEKTISKAKGQPREPQVYTLPPSRDELTKNQVSLSCAVKGFYPSDIAVEWESYGTEWANYKTTPPVLDSDGSFFLVSKLTVSKSEWQQGFVFSCSVMHEALHNHYTQKSLSLSPGK

SEQ ID NO: 2417 - protein, 217 aa, Artificial Sequence
  Description of Artificial Sequence: Synthetic polypeptide
  Synthetic Construct
APEAAGGPSVFLFPPKPKDTLYITREPEVTCVVVDVSHEDPEVKFNWYVDGVEVHNAKTKPREEQYNSTYRVVSVLTVLHQDWLNGKEYKCKVSNKALPAPIEKTISKAKGQPREPQVYTLPPSRDELTKNQVSLSCAVKGFYPSDIAVEWESYGTEWANYKTTPPVLDSDGSFFLVSKLTVSKSEWQQGFVFSCSVMHEALHNHYTQKSLSLSPGK

SEQ ID NO: 2418 - protein, 217 aa, Artificial Sequence
  Description of Artificial Sequence: Synthetic polypeptide
  Synthetic Construct
APEAAGGPSVFLFPPKPKDTLYITREPEVTCVVVDVSHEDPEVKFNWYVDGVEVHNAKTKPREEQYNSTYRVVSVLTVLHQDWLNGKEYKCKVSNKALGAPIEKTISKAKGQPREPQVYTLPPSRDELTKNQVSLSCAVKGFYPSDIAVEWESYGTEWANYKTTPPVLDSDGSFFLVSKLTVSKSEWQQGFVFSCSVMHEALHNHYTQKSLSLSPGK

SEQ ID NO: 2419 - protein, 217 aa, Artificial Sequence
  Description of Artificial Sequence: Synthetic polypeptide
  Synthetic Construct
APELLGGPSVFLFPPKPKDTLMISRTPEVTCVVVDVSHEDPEVKFNWYVDGVEVHNAKTKPREEQYNSTYRVVSVLTVLHQDWLNGKEYKCKVSNKALPAPIEKTISKAKGQPREPQVYTLPPSRDELTKNQVSLWCLVKGFYPSDIAVEWESFGTEWSNYKTTPPVLDSDGSFFLYSKLTVSKEEWQQGFVFSCSVMHEALHNHYTQKSLSLSPGK

SEQ ID NO: 2420 - protein, 217 aa, Artificial Sequence
  Description of Artificial Sequence: Synthetic polypeptide
  Synthetic Construct
APEAAGGPSVFLFPPKPKDTLMISRTPEVTCVVVDVSHEDPEVKFNWYVDGVEVHNAKTKPREEQYNSTYRVVSVLTVLHQDWLNGKEYKCKVSNKALPAPIEKTISKAKGQPREPQVYTLPPSRDELTKNQVSLWCLVKGFYPSDIAVEWESFGTEWSNYKTTPPVLDSDGSFFLYSKLTVSKEEWQQGFVFSCSVMHEALHNHYTQKSLSLSPGK

SEQ ID NO: 2421 - protein, 217 aa, Artificial Sequence
  Description of Artificial Sequence: Synthetic polypeptide
  Synthetic Construct
APEAAGGPSVFLFPPKPKDTLMISRTPEVTCVVVDVSHEDPEVKFNWYVDGVEVHNAKTKPREEQYNSTYRVVSVLTVLHQDWLNGKEYKCKVSNKALGAPIEKTISKAKGQPREPQVYTLPPSRDELTKNQVSLWCLVKGFYPSDIAVEWESFGTEWSNYKTTPPVLDSDGSFFLYSKLTVSKEEWQQGFVFSCSVMHEALHNHYTQKSLSLSPGK

SEQ ID NO: 2422 - protein, 217 aa, Artificial Sequence
  Description of Artificial Sequence: Synthetic polypeptide
  Synthetic Construct
APELLGGPSVFLFPPKPKDTLYITREPEVTCVVVDVSHEDPEVKFNWYVDGVEVHNAKTKPREEQYNSTYRVVSVLTVLHQDWLNGKEYKCKVSNKALPAPIEKTISKAKGQPREPQVYTLPPSRDELTKNQVSLWCLVKGFYPSDIAVEWESFGTEWSNYKTTPPVLDSDGSFFLYSKLTVSKEEWQQGFVFSCSVMHEALHNHYTQKSLSLSPGK

SEQ ID NO: 2423 - protein, 217 aa, Artificial Sequence
  Description of Artificial Sequence: Synthetic polypeptide
  Synthetic Construct
APEAAGGPSVFLFPPKPKDTLYITREPEVTCVVVDVSHEDPEVKFNWYVDGVEVHNAKTKPREEQYNSTYRVVSVLTVLHQDWLNGKEYKCKVSNKALPAPIEKTISKAKGQPREPQVYTLPPSRDELTKNQVSLWCLVKGFYPSDIAVEWESFGTEWSNYKTTPPVLDSDGSFFLYSKLTVSKEEWQQGFVFSCSVMHEALHNHYTQKSLSLSPGK

SEQ ID NO: 2424 - protein, 217 aa, Artificial Sequence
  Description of Artificial Sequence: Synthetic polypeptide
  Synthetic Construct
APEAAGGPSVFLFPPKPKDTLYITREPEVTCVVVDVSHEDPEVKFNWYVDGVEVHNAKTKPREEQYNSTYRVVSVLTVLHQDWLNGKEYKCKVSNKALGAPIEKTISKAKGQPREPQVYTLPPSRDELTKNQVSLWCLVKGFYPSDIAVEWESFGTEWSNYKTTPPVLDSDGSFFLYSKLTVSKEEWQQGFVFSCSVMHEALHNHYTQKSLSLSPGK

SEQ ID NO: 2425 - protein, 217 aa, Artificial Sequence
  Description of Artificial Sequence: Synthetic polypeptide
  Synthetic Construct
APELLGGPSVFLFPPKPKDTLMISRTPEVTCVVVDVSHEDPEVKFNWYVDGVEVHNAKTKPREEQYNSTYRVVSVLTVLHQDWLNGKEYKCKVSNKALPAPIEKTISKAKGQPREPQVYTLPPSRDELTKNQVSLSCAVKGFYPSDIAVEWESFGTEWSNYKTTPPVLDSDGSFFLVSKLTVSKEEWQQGFVFSCSVMHEALHNHYTQKSLSLSPGK

SEQ ID NO: 2426 - protein, 217 aa, Artificial Sequence
  Description of Artificial Sequence: Synthetic polypeptide
  Synthetic Construct
APEAAGGPSVFLFPPKPKDTLMISRTPEVTCVVVDVSHEDPEVKFNWYVDGVEVHNAKTKPREEQYNSTYRVVSVLTVLHQDWLNGKEYKCKVSNKALPAPIEKTISKAKGQPREPQVYTLPPSRDELTKNQVSLSCAVKGFYPSDIAVEWESFGTEWSNYKTTPPVLDSDGSFFLVSKLTVSKEEWQQGFVFSCSVMHEALHNHYTQKSLSLSPGK

SEQ ID NO: 2427 - protein, 217 aa, Artificial Sequence
  Description of Artificial Sequence: Synthetic polypeptide
  Synthetic Construct
APEAAGGPSVFLFPPKPKDTLMISRTPEVTCVVVDVSHEDPEVKFNWYVDGVEVHNAKTKPREEQYNSTYRVVSVLTVLHQDWLNGKEYKCKVSNKALGAPIEKTISKAKGQPREPQVYTLPPSRDELTKNQVSLSCAVKGFYPSDIAVEWESFGTEWSNYKTTPPVLDSDGSFFLVSKLTVSKEEWQQGFVFSCSVMHEALHNHYTQKSLSLSPGK

SEQ ID NO: 2428 - protein, 217 aa, Artificial Sequence
  Description of Artificial Sequence: Synthetic polypeptide
  Synthetic Construct
APELLGGPSVFLFPPKPKDTLYITREPEVTCVVVDVSHEDPEVKFNWYVDGVEVHNAKTKPREEQYNSTYRVVSVLTVLHQDWLNGKEYKCKVSNKALPAPIEKTISKAKGQPREPQVYTLPPSRDELTKNQVSLSCAVKGFYPSDIAVEWESFGTEWSNYKTTPPVLDSDGSFFLVSKLTVSKEEWQQGFVFSCSVMHEALHNHYTQKSLSLSPGK

SEQ ID NO: 2429 - protein, 217 aa, Artificial Sequence
  Description of Artificial Sequence: Synthetic polypeptide
  Synthetic Construct
APEAAGGPSVFLFPPKPKDTLYITREPEVTCVVVDVSHEDPEVKFNWYVDGVEVHNAKTKPREEQYNSTYRVVSVLTVLHQDWLNGKEYKCKVSNKALPAPIEKTISKAKGQPREPQVYTLPPSRDELTKNQVSLSCAVKGFYPSDIAVEWESFGTEWSNYKTTPPVLDSDGSFFLVSKLTVSKEEWQQGFVFSCSVMHEALHNHYTQKSLSLSPGK

SEQ ID NO: 2430 - protein, 217 aa, Artificial Sequence
  Description of Artificial Sequence: Synthetic polypeptide
  Synthetic Construct
APEAAGGPSVFLFPPKPKDTLYITREPEVTCVVVDVSHEDPEVKFNWYVDGVEVHNAKTKPREEQYNSTYRVVSVLTVLHQDWLNGKEYKCKVSNKALGAPIEKTISKAKGQPREPQVYTLPPSRDELTKNQVSLSCAVKGFYPSDIAVEWESFGTEWSNYKTTPPVLDSDGSFFLVSKLTVSKEEWQQGFVFSCSVMHEALHNHYTQKSLSLSPGK

SEQ ID NO: 2431 - protein, 217 aa, Artificial Sequence
  Description of Artificial Sequence: Synthetic polypeptide
  Synthetic Construct
APELLGGPSVFLFPPKPKDTLMISRTPEVTCVVVDVSHEDPEVKFNWYVDGVEVHNAKTKPREEQYNSTYRVVSVLTVLHQDWLNGKEYKCKVSNKALPAPIEKTISKAKGQPREPQVYTLPPSRDELTKNQVSLTCLVKGFYPSDIAVEWESFGTEWSSYKTTPPVLDSDGSFFLYSKLTVTKEEWQQGFVFSCSVLHEALHSHYTQKSLSLSPGK

SEQ ID NO: 2432 - protein, 217 aa, Artificial Sequence
  Description of Artificial Sequence: Synthetic polypeptide
  Synthetic Construct
APELLGGPSVFLFPPKPKDTLMISRTPEVTCVVVDVSHEDPEVKFNWYVDGVEVHNAKTKPREEQYNSTYRVVSVLTVLHQDWLNGKEYKCKVSNKALPAPIEKTISKAKGQPREPQVYTLPPSRDELTKNQVSLWCLVKGFYPSDIAVEWESFGTEWSSYKTTPPVLDSDGSFFLYSKLTVTKEEWQQGFVFSCSVLHEALHSHYTQKSLSLSPGK

SEQ ID NO: 2433 - protein, 217 aa, Artificial Sequence
  Description of Artificial Sequence: Synthetic polypeptide
  Synthetic Construct
APEAAGGPSVFLFPPKPKDTLMISRTPEVTCVVVDVSHEDPEVKFNWYVDGVEVHNAKTKPREEQYNSTYRVVSVLTVLHQDWLNGKEYKCKVSNKALPAPIEKTISKAKGQPREPQVYTLPPSRDELTKNQVSLWCLVKGFYPSDIAVEWESFGTEWSSYKTTPPVLDSDGSFFLYSKLTVTKEEWQQGFVFSCSVLHEALHSHYTQKSLSLSPGK

SEQ ID NO: 2434 - protein, 217 aa, Artificial Sequence
  Description of Artificial Sequence: Synthetic polypeptide
  Synthetic Construct
APEAAGGPSVFLFPPKPKDTLMISRTPEVTCVVVDVSHEDPEVKFNWYVDGVEVHNAKTKPREEQYNSTYRVVSVLTVLHQDWLNGKEYKCKVSNKALGAPIEKTISKAKGQPREPQVYTLPPSRDELTKNQVSLWCLVKGFYPSDIAVEWESFGTEWSSYKTTPPVLDSDGSFFLYSKLTVTKEEWQQGFVFSCSVLHEALHSHYTQKSLSLSPGK

SEQ ID NO: 2435 - protein, 217 aa, Artificial Sequence
  Description of Artificial Sequence: Synthetic polypeptide
  Synthetic Construct
APELLGGPSVFLFPPKPKDTLMISRTPEVTCVVVDVSHEDPEVKFNWYVDGVEVHNAKTKPREEQYNSTYRVVSVLTVLHQDWLNGKEYKCKVSNKALPAPIEKTISKAKGQPREPQVYTLPPSRDELTKNQVSLSCAVKGFYPSDIAVEWESFGTEWSSYKTTPPVLDSDGSFFLVSKLTVTKEEWQQGFVFSCSVLHEALHSHYTQKSLSLSPGK

SEQ ID NO: 2436 - protein, 217 aa, Artificial Sequence
  Description of Artificial Sequence: Synthetic polypeptide
  Synthetic Construct
APEAAGGPSVFLFPPKPKDTLMISRTPEVTCVVVDVSHEDPEVKFNWYVDGVEVHNAKTKPREEQYNSTYRVVSVLTVLHQDWLNGKEYKCKVSNKALPAPIEKTISKAKGQPREPQVYTLPPSRDELTKNQVSLSCAVKGFYPSDIAVEWESFGTEWSSYKTTPPVLDSDGSFFLVSKLTVTKEEWQQGFVFSCSVLHEALHSHYTQKSLSLSPGK

SEQ ID NO: 2437 - protein, 217 aa, Artificial Sequence
  Description of Artificial Sequence: Synthetic polypeptide
  Synthetic Construct
APEAAGGPSVFLFPPKPKDTLMISRTPEVTCVVVDVSHEDPEVKFNWYVDGVEVHNAKTKPREEQYNSTYRVVSVLTVLHQDWLNGKEYKCKVSNKALGAPIEKTISKAKGQPREPQVYTLPPSRDELTKNQVSLSCAVKGFYPSDIAVEWESFGTEWSSYKTTPPVLDSDGSFFLVSKLTVTKEEWQQGFVFSCSVLHEALHSHYTQKSLSLSPGK

SEQ ID NO: 2438 - protein, 217 aa, Artificial Sequence
  Description of Artificial Sequence: Synthetic polypeptide
  Synthetic Construct
APELLGGPSVFLFPPKPKDTLMISRTPEVTCVVVDVSHEDPEVKFNWYVDGVEVHNAKTKPREEQYNSTYRVVSVLTVLHQDWLNGKEYKCKVSNKALPAPIEKTISKAKGQPREPQVYTLPPSRDELTKNQVSLTCLVKGFYPSDIAVEWESFGTEWSSYKTTPPVLDSDGSFFLYSKLTVSKEEWQQGFVFSCSVLHEALHSHYTQKSLSLSPGK

SEQ ID NO: 2439 - protein, 217 aa, Artificial Sequence
  Description of Artificial Sequence: Synthetic polypeptide
  Synthetic Construct
APELLGGPSVFLFPPKPKDTLMISRTPEVTCVVVDVSHEDPEVKFNWYVDGVEVHNAKTKPREEQYNSTYRVVSVLTVLHQDWLNGKEYKCKVSNKALPAPIEKTISKAKGQPREPQVYTLPPSRDELTKNQVSLWCLVKGFYPSDIAVEWESFGTEWSSYKTTPPVLDSDGSFFLYSKLTVSKEEWQQGFVFSCSVLHEALHSHYTQKSLSLSPGK

SEQ ID NO: 2440 - protein, 217 aa, Artificial Sequence
  Description of Artificial Sequence: Synthetic polypeptide
  Synthetic Construct
APEAAGGPSVFLFPPKPKDTLMISRTPEVTCVVVDVSHEDPEVKFNWYVDGVEVHNAKTKPREEQYNSTYRVVSVLTVLHQDWLNGKEYKCKVSNKALPAPIEKTISKAKGQPREPQVYTLPPSRDELTKNQVSLWCLVKGFYPSDIAVEWESFGTEWSSYKTTPPVLDSDGSFFLYSKLTVSKEEWQQGFVFSCSVLHEALHSHYTQKSLSLSPGK

SEQ ID NO: 2441 - protein, 217 aa, Artificial Sequence
  Description of Artificial Sequence: Synthetic polypeptide
  Synthetic Construct
APEAAGGPSVFLFPPKPKDTLMISRTPEVTCVVVDVSHEDPEVKFNWYVDGVEVHNAKTKPREEQYNSTYRVVSVLTVLHQDWLNGKEYKCKVSNKALGAPIEKTISKAKGQPREPQVYTLPPSRDELTKNQVSLWCLVKGFYPSDIAVEWESFGTEWSSYKTTPPVLDSDGSFFLYSKLTVSKEEWQQGFVFSCSVLHEALHSHYTQKSLSLSPGK

SEQ ID NO: 2442 - protein, 217 aa, Artificial Sequence
  Description of Artificial Sequence: Synthetic polypeptide
  Synthetic Construct
APELLGGPSVFLFPPKPKDTLMISRTPEVTCVVVDVSHEDPEVKFNWYVDGVEVHNAKTKPREEQYNSTYRVVSVLTVLHQDWLNGKEYKCKVSNKALPAPIEKTISKAKGQPREPQVYTLPPSRDELTKNQVSLSCAVKGFYPSDIAVEWESFGTEWSSYKTTPPVLDSDGSFFLVSKLTVSKEEWQQGFVFSCSVLHEALHSHYTQKSLSLSPGK

SEQ ID NO: 2443 - protein, 217 aa, Artificial Sequence
  Description of Artificial Sequence: Synthetic polypeptide
  Synthetic Construct
APEAAGGPSVFLFPPKPKDTLMISRTPEVTCVVVDVSHEDPEVKFNWYVDGVEVHNAKTKPREEQYNSTYRVVSVLTVLHQDWLNGKEYKCKVSNKALPAPIEKTISKAKGQPREPQVYTLPPSRDELTKNQVSLSCAVKGFYPSDIAVEWESFGTEWSSYKTTPPVLDSDGSFFLVSKLTVSKEEWQQGFVFSCSVLHEALHSHYTQKSLSLSPGK

SEQ ID NO: 2444 - protein, 217 aa, Artificial Sequence
  Description of Artificial Sequence: Synthetic polypeptide
  Synthetic Construct
APEAAGGPSVFLFPPKPKDTLMISRTPEVTCVVVDVSHEDPEVKFNWYVDGVEVHNAKTKPREEQYNSTYRVVSVLTVLHQDWLNGKEYKCKVSNKALGAPIEKTISKAKGQPREPQVYTLPPSRDELTKNQVSLSCAVKGFYPSDIAVEWESFGTEWSSYKTTPPVLDSDGSFFLVSKLTVSKEEWQQGFVFSCSVLHEALHSHYTQKSLSLSPGK

SEQ ID NO: 2445 - protein, 217 aa, Artificial Sequence
  Description of Artificial Sequence: Synthetic polypeptide
  Synthetic Construct
APELLGGPSVFLFPPKPKDTLMISRTPEVTCVVVDVSHEDPEVKFNWYVDGVEVHNAKTKPREEQYNSTYRVVSVLTVLHQDWLNGKEYKCKVSNKALPAPIEKTISKAKGQPREPQVYTLPPSRDELTKNQVSLTCLVKGFYPSDIAVWWESYGTEWSSYKTTPPVLDSDGSFFLYSKLTVTKEEWQQGFVFSCSVLHEALHSHYTQKSLSLSPGK

SEQ ID NO: 2446 - protein, 217 aa, Artificial Sequence
  Description of Artificial Sequence: Synthetic polypeptide
  Synthetic Construct
APELLGGPSVFLFPPKPKDTLMISRTPEVTCVVVDVSHEDPEVKFNWYVDGVEVHNAKTKPREEQYNSTYRVVSVLTVLHQDWLNGKEYKCKVSNKALPAPIEKTISKAKGQPREPQVYTLPPSRDELTKNQVSLWCLVKGFYPSDIAVWWESYGTEWSSYKTTPPVLDSDGSFFLYSKLTVTKEEWQQGFVFSCSVLHEALHSHYTQKSLSLSPGK

SEQ ID NO: 2447 - protein, 217 aa, Artificial Sequence
  Description of Artificial Sequence: Synthetic polypeptide
  Synthetic Construct
APEAAGGPSVFLFPPKPKDTLMISRTPEVTCVVVDVSHEDPEVKFNWYVDGVEVHNAKTKPREEQYNSTYRVVSVLTVLHQDWLNGKEYKCKVSNKALPAPIEKTISKAKGQPREPQVYTLPPSRDELTKNQVSLWCLVKGFYPSDIAVWWESYGTEWSSYKTTPPVLDSDGSFFLYSKLTVTKEEWQQGFVFSCSVLHEALHSHYTQKSLSLSPGK

SEQ ID NO: 2448 - protein, 217 aa, Artificial Sequence
  Description of Artificial Sequence: Synthetic polypeptide
  Synthetic Construct
APEAAGGPSVFLFPPKPKDTLMISRTPEVTCVVVDVSHEDPEVKFNWYVDGVEVHNAKTKPREEQYNSTYRVVSVLTVLHQDWLNGKEYKCKVSNKALGAPIEKTISKAKGQPREPQVYTLPPSRDELTKNQVSLWCLVKGFYPSDIAVWWESYGTEWSSYKTTPPVLDSDGSFFLYSKLTVTKEEWQQGFVFSCSVLHEALHSHYTQKSLSLSPGK

SEQ ID NO: 2449 - protein, 217 aa, Artificial Sequence
  Description of Artificial Sequence: Synthetic polypeptide
  Synthetic Construct
APELLGGPSVFLFPPKPKDTLMISRTPEVTCVVVDVSHEDPEVKFNWYVDGVEVHNAKTKPREEQYNSTYRVVSVLTVLHQDWLNGKEYKCKVSNKALPAPIEKTISKAKGQPREPQVYTLPPSRDELTKNQVSLSCAVKGFYPSDIAVWWESYGTEWSSYKTTPPVLDSDGSFFLVSKLTVTKEEWQQGFVFSCSVLHEALHSHYTQKSLSLSPGK

SEQ ID NO: 2450 - protein, 217 aa, Artificial Sequence
  Description of Artificial Sequence: Synthetic polypeptide
  Synthetic Construct
APEAAGGPSVFLFPPKPKDTLMISRTPEVTCVVVDVSHEDPEVKFNWYVDGVEVHNAKTKPREEQYNSTYRVVSVLTVLHQDWLNGKEYKCKVSNKALPAPIEKTISKAKGQPREPQVYTLPPSRDELTKNQVSLSCAVKGFYPSDIAVWWESYGTEWSSYKTTPPVLDSDGSFFLVSKLTVTKEEWQQGFVFSCSVLHEALHSHYTQKSLSLSPGK

SEQ ID NO: 2451 - protein, 217 aa, Artificial Sequence
  Description of Artificial Sequence: Synthetic polypeptide
  Synthetic Construct
APEAAGGPSVFLFPPKPKDTLMISRTPEVTCVVVDVSHEDPEVKFNWYVDGVEVHNAKTKPREEQYNSTYRVVSVLTVLHQDWLNGKEYKCKVSNKALGAPIEKTISKAKGQPREPQVYTLPPSRDELTKNQVSLSCAVKGFYPSDIAVWWESYGTEWSSYKTTPPVLDSDGSFFLVSKLTVTKEEWQQGFVFSCSVLHEALHSHYTQKSLSLSPGK

SEQ ID NO: 2452 - protein, 217 aa, Artificial Sequence
  Description of Artificial Sequence: Synthetic polypeptide
  Synthetic Construct
APELLGGPSVFLFPPKPKDTLMISRTPEVTCVVVDVSHEDPEVKFNWYVDGVEVHNAKTKPREEQYNSTYRVVSVLTVLHQDWLNGKEYKCKVSNKALPAPIEKTISKAKGQPREPQVYTLPPSRDELTKNQVSLTCLVKGFYPSDIAVLWESYGTEWASYKTTPPVLDSDGSFFLYSKLTVTKEEWQQGFVFSCSVLHEALHSHYTQKSLSLSPGK

SEQ ID NO: 2453 - protein, 217 aa, Artificial Sequence
  Description of Artificial Sequence: Synthetic polypeptide
  Synthetic Construct
APELLGGPSVFLFPPKPKDTLMISRTPEVTCVVVDVSHEDPEVKFNWYVDGVEVHNAKTKPREEQYNSTYRVVSVLTVLHQDWLNGKEYKCKVSNKALPAPIEKTISKAKGQPREPQVYTLPPSRDELTKNQVSLWCLVKGFYPSDIAVLWESYGTEWASYKTTPPVLDSDGSFFLYSKLTVTKEEWQQGFVFSCSVLHEALHSHYTQKSLSLSPGK

SEQ ID NO: 2454 - protein, 217 aa, Artificial Sequence
  Description of Artificial Sequence: Synthetic polypeptide
  Synthetic Construct
APEAAGGPSVFLFPPKPKDTLMISRTPEVTCVVVDVSHEDPEVKFNWYVDGVEVHNAKTKPREEQYNSTYRVVSVLTVLHQDWLNGKEYKCKVSNKALPAPIEKTISKAKGQPREPQVYTLPPSRDELTKNQVSLWCLVKGFYPSDIAVLWESYGTEWASYKTTPPVLDSDGSFFLYSKLTVTKEEWQQGFVFSCSVLHEALHSHYTQKSLSLSPGK

SEQ ID NO: 2455 - protein, 217 aa, Artificial Sequence
  Description of Artificial Sequence: Synthetic polypeptide
  Synthetic Construct
APEAAGGPSVFLFPPKPKDTLMISRTPEVTCVVVDVSHEDPEVKFNWYVDGVEVHNAKTKPREEQYNSTYRVVSVLTVLHQDWLNGKEYKCKVSNKALGAPIEKTISKAKGQPREPQVYTLPPSRDELTKNQVSLWCLVKGFYPSDIAVLWESYGTEWASYKTTPPVLDSDGSFFLYSKLTVTKEEWQQGFVFSCSVLHEALHSHYTQKSLSLSPGK

SEQ ID NO: 2456 - protein, 217 aa, Artificial Sequence
  Description of Artificial Sequence: Synthetic polypeptide
  Synthetic Construct
APELLGGPSVFLFPPKPKDTLMISRTPEVTCVVVDVSHEDPEVKFNWYVDGVEVHNAKTKPREEQYNSTYRVVSVLTVLHQDWLNGKEYKCKVSNKALPAPIEKTISKAKGQPREPQVYTLPPSRDELTKNQVSLSCAVKGFYPSDIAVLWESYGTEWASYKTTPPVLDSDGSFFLVSKLTVTKEEWQQGFVFSCSVLHEALHSHYTQKSLSLSPGK

SEQ ID NO: 2457 - protein, 217 aa, Artificial Sequence
  Description of Artificial Sequence: Synthetic polypeptide
  Synthetic Construct
APEAAGGPSVFLFPPKPKDTLMISRTPEVTCVVVDVSHEDPEVKFNWYVDGVEVHNAKTKPREEQYNSTYRVVSVLTVLHQDWLNGKEYKCKVSNKALPAPIEKTISKAKGQPREPQVYTLPPSRDELTKNQVSLSCAVKGFYPSDIAVLWESYGTEWASYKTTPPVLDSDGSFFLVSKLTVTKEEWQQGFVFSCSVLHEALHSHYTQKSLSLSPGK

SEQ ID NO: 2458 - protein, 217 aa, Artificial Sequence
  Description of Artificial Sequence: Synthetic polypeptide
  Synthetic Construct
APEAAGGPSVFLFPPKPKDTLMISRTPEVTCVVVDVSHEDPEVKFNWYVDGVEVHNAKTKPREEQYNSTYRVVSVLTVLHQDWLNGKEYKCKVSNKALGAPIEKTISKAKGQPREPQVYTLPPSRDELTKNQVSLSCAVKGFYPSDIAVLWESYGTEWASYKTTPPVLDSDGSFFLVSKLTVTKEEWQQGFVFSCSVLHEALHSHYTQKSLSLSPGK

SEQ ID NO: 2459 - protein, 217 aa, Artificial Sequence
  Description of Artificial Sequence: Synthetic polypeptide
  Synthetic Construct
APELLGGPSVFLFPPKPKDTLMISRTPEVTCVVVDVSHEDPEVKFNWYVDGVEVHNAKTKPREEQYNSTYRVVSVLTVLHQDWLNGKEYKCKVSNKALPAPIEKTISKAKGQPREPQVYTLPPSRDELTKNQVSLTCLVKGFYPSDIAVEWESYGTEWSNYKTTPPVLDSDGSFFLYSKLTVTKEEWQQGFVFSCSVLHEALHSHYTQKSLSLSPGK

SEQ ID NO: 2460 - protein, 217 aa, Artificial Sequence
  Description of Artificial Sequence: Synthetic polypeptide
  Synthetic Construct
APELLGGPSVFLFPPKPKDTLMISRTPEVTCVVVDVSHEDPEVKFNWYVDGVEVHNAKTKPREEQYNSTYRVVSVLTVLHQDWLNGKEYKCKVSNKALPAPIEKTISKAKGQPREPQVYTLPPSRDELTKNQVSLWCLVKGFYPSDIAVEWESYGTEWSNYKTTPPVLDSDGSFFLYSKLTVTKEEWQQGFVFSCSVLHEALHSHYTQKSLSLSPGK

SEQ ID NO: 2461 - protein, 217 aa, Artificial Sequence
  Description of Artificial Sequence: Synthetic polypeptide
  Synthetic Construct
APEAAGGPSVFLFPPKPKDTLMISRTPEVTCVVVDVSHEDPEVKFNWYVDGVEVHNAKTKPREEQYNSTYRVVSVLTVLHQDWLNGKEYKCKVSNKALPAPIEKTISKAKGQPREPQVYTLPPSRDELTKNQVSLWCLVKGFYPSDIAVEWESYGTEWSNYKTTPPVLDSDGSFFLYSKLTVTKEEWQQGFVFSCSVLHEALHSHYTQKSLSLSPGK

SEQ ID NO: 2462 - protein, 217 aa, Artificial Sequence
  Description of Artificial Sequence: Synthetic polypeptide
  Synthetic Construct
APEAAGGPSVFLFPPKPKDTLMISRTPEVTCVVVDVSHEDPEVKFNWYVDGVEVHNAKTKPREEQYNSTYRVVSVLTVLHQDWLNGKEYKCKVSNKALGAPIEKTISKAKGQPREPQVYTLPPSRDELTKNQVSLWCLVKGFYPSDIAVEWESYGTEWSNYKTTPPVLDSDGSFFLYSKLTVTKEEWQQGFVFSCSVLHEALHSHYTQKSLSLSPGK

SEQ ID NO: 2463 - protein, 217 aa, Artificial Sequence
  Description of Artificial Sequence: Synthetic polypeptide
  Synthetic Construct
APELLGGPSVFLFPPKPKDTLMISRTPEVTCVVVDVSHEDPEVKFNWYVDGVEVHNAKTKPREEQYNSTYRVVSVLTVLHQDWLNGKEYKCKVSNKALPAPIEKTISKAKGQPREPQVYTLPPSRDELTKNQVSLSCAVKGFYPSDIAVEWESYGTEWSNYKTTPPVLDSDGSFFLVSKLTVTKEEWQQGFVFSCSVLHEALHSHYTQKSLSLSPGK

SEQ ID NO: 2464 - protein, 217 aa, Artificial Sequence
  Description of Artificial Sequence: Synthetic polypeptide
  Synthetic Construct
APEAAGGPSVFLFPPKPKDTLMISRTPEVTCVVVDVSHEDPEVKFNWYVDGVEVHNAKTKPREEQYNSTYRVVSVLTVLHQDWLNGKEYKCKVSNKALPAPIEKTISKAKGQPREPQVYTLPPSRDELTKNQVSLSCAVKGFYPSDIAVEWESYGTEWSNYKTTPPVLDSDGSFFLVSKLTVTKEEWQQGFVFSCSVLHEALHSHYTQKSLSLSPGK

SEQ ID NO: 2465 - protein, 217 aa, Artificial Sequence
  Description of Artificial Sequence: Synthetic polypeptide
  Synthetic Construct
APEAAGGPSVFLFPPKPKDTLMISRTPEVTCVVVDVSHEDPEVKFNWYVDGVEVHNAKTKPREEQYNSTYRVVSVLTVLHQDWLNGKEYKCKVSNKALGAPIEKTISKAKGQPREPQVYTLPPSRDELTKNQVSLSCAVKGFYPSDIAVEWESYGTEWSNYKTTPPVLDSDGSFFLVSKLTVTKEEWQQGFVFSCSVLHEALHSHYTQKSLSLSPGK

SEQ ID NO: 2466 - protein, 217 aa, Artificial Sequence
  Description of Artificial Sequence: Synthetic polypeptide
  Synthetic Construct
APELLGGPSVFLFPPKPKDTLMISRTPEVTCVVVDVSHEDPEVKFNWYVDGVEVHNAKTKPREEQYNSTYRVVSVLTVLHQDWLNGKEYKCKVSNKALPAPIEKTISKAKGQPREPQVYTLPPSRDELTKNQVSLTCLVKGFYPSDIAVEWESFGTEWSNYKTTPPVLDSDGSFFLYSKLTVSKEEWQQGFVFSCSVLHEALHSHYTQKSLSLSPGK

SEQ ID NO: 2467 - protein, 217 aa, Artificial Sequence
  Description of Artificial Sequence: Synthetic polypeptide
  Synthetic Construct
APELLGGPSVFLFPPKPKDTLMISRTPEVTCVVVDVSHEDPEVKFNWYVDGVEVHNAKTKPREEQYNSTYRVVSVLTVLHQDWLNGKEYKCKVSNKALPAPIEKTISKAKGQPREPQVYTLPPSRDELTKNQVSLWCLVKGFYPSDIAVEWESFGTEWSNYKTTPPVLDSDGSFFLYSKLTVSKEEWQQGFVFSCSVLHEALHSHYTQKSLSLSPGK

SEQ ID NO: 2468 - protein, 217 aa, Artificial Sequence
  Description of Artificial Sequence: Synthetic polypeptide
  Synthetic Construct
APEAAGGPSVFLFPPKPKDTLMISRTPEVTCVVVDVSHEDPEVKFNWYVDGVEVHNAKTKPREEQYNSTYRVVSVLTVLHQDWLNGKEYKCKVSNKALPAPIEKTISKAKGQPREPQVYTLPPSRDELTKNQVSLWCLVKGFYPSDIAVEWESFGTEWSNYKTTPPVLDSDGSFFLYSKLTVSKEEWQQGFVFSCSVLHEALHSHYTQKSLSLSPGK

SEQ ID NO: 2469 - protein, 217 aa, Artificial Sequence
  Description of Artificial Sequence: Synthetic polypeptide
  Synthetic Construct
APEAAGGPSVFLFPPKPKDTLMISRTPEVTCVVVDVSHEDPEVKFNWYVDGVEVHNAKTKPREEQYNSTYRVVSVLTVLHQDWLNGKEYKCKVSNKALGAPIEKTISKAKGQPREPQVYTLPPSRDELTKNQVSLWCLVKGFYPSDIAVEWESFGTEWSNYKTTPPVLDSDGSFFLYSKLTVSKEEWQQGFVFSCSVLHEALHSHYTQKSLSLSPGK

SEQ ID NO: 2470 - protein, 217 aa, Artificial Sequence
  Description of Artificial Sequence: Synthetic polypeptide
  Synthetic Construct
APELLGGPSVFLFPPKPKDTLMISRTPEVTCVVVDVSHEDPEVKFNWYVDGVEVHNAKTKPREEQYNSTYRVVSVLTVLHQDWLNGKEYKCKVSNKALPAPIEKTISKAKGQPREPQVYTLPPSRDELTKNQVSLSCAVKGFYPSDIAVEWESFGTEWSNYKTTPPVLDSDGSFFLVSKLTVSKEEWQQGFVFSCSVLHEALHSHYTQKSLSLSPGK

SEQ ID NO: 2471 - protein, 217 aa, Artificial Sequence
  Description of Artificial Sequence: Synthetic polypeptide
  Synthetic Construct
APEAAGGPSVFLFPPKPKDTLMISRTPEVTCVVVDVSHEDPEVKFNWYVDGVEVHNAKTKPREEQYNSTYRVVSVLTVLHQDWLNGKEYKCKVSNKALPAPIEKTISKAKGQPREPQVYTLPPSRDELTKNQVSLSCAVKGFYPSDIAVEWESFGTEWSNYKTTPPVLDSDGSFFLVSKLTVSKEEWQQGFVFSCSVLHEALHSHYTQKSLSLSPGK

SEQ ID NO: 2472 - protein, 217 aa, Artificial Sequence
  Description of Artificial Sequence: Synthetic polypeptide
  Synthetic Construct
APEAAGGPSVFLFPPKPKDTLMISRTPEVTCVVVDVSHEDPEVKFNWYVDGVEVHNAKTKPREEQYNSTYRVVSVLTVLHQDWLNGKEYKCKVSNKALGAPIEKTISKAKGQPREPQVYTLPPSRDELTKNQVSLSCAVKGFYPSDIAVEWESFGTEWSNYKTTPPVLDSDGSFFLVSKLTVSKEEWQQGFVFSCSVLHEALHSHYTQKSLSLSPGK

SEQ ID NO: 2473 - protein, 217 aa, Artificial Sequence
  Description of Artificial Sequence: Synthetic polypeptide
  Synthetic Construct
APELLGGPSVFLFPPKPKDTLMISRTPEVTCVVVDVSHEDPEVKFNWYVDGVEVHNAKTKPREEQYNSTYRVVSVLTVLHQDWLNGKEYKCKVSNKALPAPIEKTISKAKGQPREPQVYTLPPSRDELTKNQVSLTCLVKGFYPSDIAVEWESYGTEWANYKTTPPVLDSDGSFFLYSKLTVTKEEWQQGFVFSCSVLHEALHSHYTQKSLSLSPGK

SEQ ID NO: 2474 - protein, 217 aa, Artificial Sequence
  Description of Artificial Sequence: Synthetic polypeptide
  Synthetic Construct
APELLGGPSVFLFPPKPKDTLMISRTPEVTCVVVDVSHEDPEVKFNWYVDGVEVHNAKTKPREEQYNSTYRVVSVLTVLHQDWLNGKEYKCKVSNKALPAPIEKTISKAKGQPREPQVYTLPPSRDELTKNQVSLWCLVKGFYPSDIAVEWESYGTEWANYKTTPPVLDSDGSFFLYSKLTVTKEEWQQGFVFSCSVLHEALHSHYTQKSLSLSPGK

SEQ ID NO: 2475 - protein, 217 aa, Artificial Sequence
  Description of Artificial Sequence: Synthetic polypeptide
  Synthetic Construct
APEAAGGPSVFLFPPKPKDTLMISRTPEVTCVVVDVSHEDPEVKFNWYVDGVEVHNAKTKPREEQYNSTYRVVSVLTVLHQDWLNGKEYKCKVSNKALPAPIEKTISKAKGQPREPQVYTLPPSRDELTKNQVSLWCLVKGFYPSDIAVEWESYGTEWANYKTTPPVLDSDGSFFLYSKLTVTKEEWQQGFVFSCSVLHEALHSHYTQKSLSLSPGK

SEQ ID NO: 2476 - protein, 217 aa, Artificial Sequence
  Description of Artificial Sequence: Synthetic polypeptide
  Synthetic Construct
APEAAGGPSVFLFPPKPKDTLMISRTPEVTCVVVDVSHEDPEVKFNWYVDGVEVHNAKTKPREEQYNSTYRVVSVLTVLHQDWLNGKEYKCKVSNKALGAPIEKTISKAKGQPREPQVYTLPPSRDELTKNQVSLWCLVKGFYPSDIAVEWESYGTEWANYKTTPPVLDSDGSFFLYSKLTVTKEEWQQGFVFSCSVLHEALHSHYTQKSLSLSPGK

SEQ ID NO: 2477 - protein, 217 aa, Artificial Sequence
  Description of Artificial Sequence: Synthetic polypeptide
  Synthetic Construct
APELLGGPSVFLFPPKPKDTLMISRTPEVTCVVVDVSHEDPEVKFNWYVDGVEVHNAKTKPREEQYNSTYRVVSVLTVLHQDWLNGKEYKCKVSNKALPAPIEKTISKAKGQPREPQVYTLPPSRDELTKNQVSLSCAVKGFYPSDIAVEWESYGTEWANYKTTPPVLDSDGSFFLVSKLTVTKEEWQQGFVFSCSVLHEALHSHYTQKSLSLSPGK

SEQ ID NO: 2478 - protein, 217 aa, Artificial Sequence
  Description of Artificial Sequence: Synthetic polypeptide
  Synthetic Construct
APEAAGGPSVFLFPPKPKDTLMISRTPEVTCVVVDVSHEDPEVKFNWYVDGVEVHNAKTKPREEQYNSTYRVVSVLTVLHQDWLNGKEYKCKVSNKALPAPIEKTISKAKGQPREPQVYTLPPSRDELTKNQVSLSCAVKGFYPSDIAVEWESYGTEWANYKTTPPVLDSDGSFFLVSKLTVTKEEWQQGFVFSCSVLHEALHSHYTQKSLSLSPGK

SEQ ID NO: 2479 - protein, 217 aa, Artificial Sequence
  Description of Artificial Sequence: Synthetic polypeptide
  Synthetic Construct
APEAAGGPSVFLFPPKPKDTLMISRTPEVTCVVVDVSHEDPEVKFNWYVDGVEVHNAKTKPREEQYNSTYRVVSVLTVLHQDWLNGKEYKCKVSNKALGAPIEKTISKAKGQPREPQVYTLPPSRDELTKNQVSLSCAVKGFYPSDIAVEWESYGTEWANYKTTPPVLDSDGSFFLVSKLTVTKEEWQQGFVFSCSVLHEALHSHYTQKSLSLSPGK

SEQ ID NO: 2480 - protein, 217 aa, Artificial Sequence
  Description of Artificial Sequence: Synthetic polypeptide
  Synthetic Construct
APELLGGPSVFLFPPKPKDTLMISRTPEVTCVVVDVSHEDPEVKFNWYVDGVEVHNAKTKPREEQYNSTYRVVSVLTVLHQDWLNGKEYKCKVSNKALPAPIEKTISKAKGQPREPQVYTLPPSRDELTKNQVSLTCLVKGFYPSDIAVEWESYGTEWANYKTTPPVLDSDGSFFLYSKLTVSKSEWQQGFVFSCSVLHEALHSHYTQKSLSLSPGK

SEQ ID NO: 2481 - protein, 217 aa, Artificial Sequence
  Description of Artificial Sequence: Synthetic polypeptide
  Synthetic Construct
APELLGGPSVFLFPPKPKDTLMISRTPEVTCVVVDVSHEDPEVKFNWYVDGVEVHNAKTKPREEQYNSTYRVVSVLTVLHQDWLNGKEYKCKVSNKALPAPIEKTISKAKGQPREPQVYTLPPSRDELTKNQVSLWCLVKGFYPSDIAVEWESYGTEWANYKTTPPVLDSDGSFFLYSKLTVSKSEWQQGFVFSCSVLHEALHSHYTQKSLSLSPGK

SEQ ID NO: 2482 - protein, 217 aa, Artificial Sequence
  Description of Artificial Sequence: Synthetic polypeptide
  Synthetic Construct
APEAAGGPSVFLFPPKPKDTLMISRTPEVTCVVVDVSHEDPEVKFNWYVDGVEVHNAKTKPREEQYNSTYRVVSVLTVLHQDWLNGKEYKCKVSNKALPAPIEKTISKAKGQPREPQVYTLPPSRDELTKNQVSLWCLVKGFYPSDIAVEWESYGTEWANYKTTPPVLDSDGSFFLYSKLTVSKSEWQQGFVFSCSVLHEALHSHYTQKSLSLSPGK

SEQ ID NO: 2483 - protein, 217 aa, Artificial Sequence
  Description of Artificial Sequence: Synthetic polypeptide
  Synthetic Construct
APEAAGGPSVFLFPPKPKDTLMISRTPEVTCVVVDVSHEDPEVKFNWYVDGVEVHNAKTKPREEQYNSTYRVVSVLTVLHQDWLNGKEYKCKVSNKALGAPIEKTISKAKGQPREPQVYTLPPSRDELTKNQVSLWCLVKGFYPSDIAVEWESYGTEWANYKTTPPVLDSDGSFFLYSKLTVSKSEWQQGFVFSCSVLHEALHSHYTQKSLSLSPGK

SEQ ID NO: 2484 - protein, 217 aa, Artificial Sequence
  Description of Artificial Sequence: Synthetic polypeptide
  Synthetic Construct
APELLGGPSVFLFPPKPKDTLMISRTPEVTCVVVDVSHEDPEVKFNWYVDGVEVHNAKTKPREEQYNSTYRVVSVLTVLHQDWLNGKEYKCKVSNKALPAPIEKTISKAKGQPREPQVYTLPPSRDELTKNQVSLSCAVKGFYPSDIAVEWESYGTEWANYKTTPPVLDSDGSFFLVSKLTVSKSEWQQGFVFSCSVLHEALHSHYTQKSLSLSPGK

SEQ ID NO: 2485 - protein, 217 aa, Artificial Sequence
  Description of Artificial Sequence: Synthetic polypeptide
  Synthetic Construct
APEAAGGPSVFLFPPKPKDTLMISRTPEVTCVVVDVSHEDPEVKFNWYVDGVEVHNAKTKPREEQYNSTYRVVSVLTVLHQDWLNGKEYKCKVSNKALPAPIEKTISKAKGQPREPQVYTLPPSRDELTKNQVSLSCAVKGFYPSDIAVEWESYGTEWANYKTTPPVLDSDGSFFLVSKLTVSKSEWQQGFVFSCSVLHEALHSHYTQKSLSLSPGK

SEQ ID NO: 2486 - protein, 217 aa, Artificial Sequence
  Description of Artificial Sequence: Synthetic polypeptide
  Synthetic Construct
APEAAGGPSVFLFPPKPKDTLMISRTPEVTCVVVDVSHEDPEVKFNWYVDGVEVHNAKTKPREEQYNSTYRVVSVLTVLHQDWLNGKEYKCKVSNKALGAPIEKTISKAKGQPREPQVYTLPPSRDELTKNQVSLSCAVKGFYPSDIAVEWESYGTEWANYKTTPPVLDSDGSFFLVSKLTVSKSEWQQGFVFSCSVLHEALHSHYTQKSLSLSPGK

SEQ ID NO: 2487 - protein, 217 aa, Artificial Sequence
  Description of Artificial Sequence: Synthetic polypeptide
  Synthetic Construct
APELLGGPSVFLFPPKPKDTLMISRTPEVTCVVVDVSHEDPEVKFNWYVDGVEVHNAKTKPREEQYNSTYRVVSVLTVLHQDWLNGKEYKCKVSNKALPAPIEKTISKAKGQPREPQVYTLPPSRDELTKNQVSLTCLVKGFYPSDIAVEWESYGTEWVNYKTTPPVLDSDGSFFLYSKLTVTKEEWQQGFVFSCSVLHEALHSHYTQKSLSLSPGK

SEQ ID NO: 2488 - protein, 217 aa, Artificial Sequence
  Description of Artificial Sequence: Synthetic polypeptide
  Synthetic Construct
APELLGGPSVFLFPPKPKDTLMISRTPEVTCVVVDVSHEDPEVKFNWYVDGVEVHNAKTKPREEQYNSTYRVVSVLTVLHQDWLNGKEYKCKVSNKALPAPIEKTISKAKGQPREPQVYTLPPSRDELTKNQVSLWCLVKGFYPSDIAVEWESYGTEWVNYKTTPPVLDSDGSFFLYSKLTVTKEEWQQGFVFSCSVLHEALHSHYTQKSLSLSPGK

SEQ ID NO: 2489 - protein, 217 aa, Artificial Sequence
  Description of Artificial Sequence: Synthetic polypeptide
  Synthetic Construct
APEAAGGPSVFLFPPKPKDTLMISRTPEVTCVVVDVSHEDPEVKFNWYVDGVEVHNAKTKPREEQYNSTYRVVSVLTVLHQDWLNGKEYKCKVSNKALPAPIEKTISKAKGQPREPQVYTLPPSRDELTKNQVSLWCLVKGFYPSDIAVEWESYGTEWVNYKTTPPVLDSDGSFFLYSKLTVTKEEWQQGFVFSCSVLHEALHSHYTQKSLSLSPGK

SEQ ID NO: 2490 - protein, 217 aa, Artificial Sequence
  Description of Artificial Sequence: Synthetic polypeptide
  Synthetic Construct
APEAAGGPSVFLFPPKPKDTLMISRTPEVTCVVVDVSHEDPEVKFNWYVDGVEVHNAKTKPREEQYNSTYRVVSVLTVLHQDWLNGKEYKCKVSNKALGAPIEKTISKAKGQPREPQVYTLPPSRDELTKNQVSLWCLVKGFYPSDIAVEWESYGTEWVNYKTTPPVLDSDGSFFLYSKLTVTKEEWQQGFVFSCSVLHEALHSHYTQKSLSLSPGK

SEQ ID NO: 2491 - protein, 217 aa, Artificial Sequence
  Description of Artificial Sequence: Synthetic polypeptide
  Synthetic Construct
APELLGGPSVFLFPPKPKDTLMISRTPEVTCVVVDVSHEDPEVKFNWYVDGVEVHNAKTKPREEQYNSTYRVVSVLTVLHQDWLNGKEYKCKVSNKALPAPIEKTISKAKGQPREPQVYTLPPSRDELTKNQVSLSCAVKGFYPSDIAVEWESYGTEWVNYKTTPPVLDSDGSFFLVSKLTVTKEEWQQGFVFSCSVLHEALHSHYTQKSLSLSPGK

SEQ ID NO: 2492 - protein, 217 aa, Artificial Sequence
  Description of Artificial Sequence: Synthetic polypeptide
  Synthetic Construct
APEAAGGPSVFLFPPKPKDTLMISRTPEVTCVVVDVSHEDPEVKFNWYVDGVEVHNAKTKPREEQYNSTYRVVSVLTVLHQDWLNGKEYKCKVSNKALPAPIEKTISKAKGQPREPQVYTLPPSRDELTKNQVSLSCAVKGFYPSDIAVEWESYGTEWVNYKTTPPVLDSDGSFFLVSKLTVTKEEWQQGFVFSCSVLHEALHSHYTQKSLSLSPGK

SEQ ID NO: 2493 - protein, 217 aa, Artificial Sequence
  Description of Artificial Sequence: Synthetic polypeptide
  Synthetic Construct
APEAAGGPSVFLFPPKPKDTLMISRTPEVTCVVVDVSHEDPEVKFNWYVDGVEVHNAKTKPREEQYNSTYRVVSVLTVLHQDWLNGKEYKCKVSNKALGAPIEKTISKAKGQPREPQVYTLPPSRDELTKNQVSLSCAVKGFYPSDIAVEWESYGTEWVNYKTTPPVLDSDGSFFLVSKLTVTKEEWQQGFVFSCSVLHEALHSHYTQKSLSLSPGK

SEQ ID NO: 2494 - protein, 217 aa, Artificial Sequence
  Description of Artificial Sequence: Synthetic polypeptide
  Synthetic Construct
APELLGGPSVFLFPPKPKDTLMISRTPEVTCVVVDVSHEDPEVKFNWYVDGVEVHNAKTKPREEQYNSTYRVVSVLTVLHQDWLNGKEYKCKVSNKALPAPIEKTISKAKGQPREPQVYTLPPSRDELTKNQVSLTCLVKGFYPSDIAVEWESYGTEWSNYKTTPPVLDSDGSFFLYSKLTVSKEEWQQGFVFSCSVLHEALHSHYTQKSLSLSPGK

SEQ ID NO: 2495 - protein, 217 aa, Artificial Sequence
  Description of Artificial Sequence: Synthetic polypeptide
  Synthetic Construct
APELLGGPSVFLFPPKPKDTLMISRTPEVTCVVVDVSHEDPEVKFNWYVDGVEVHNAKTKPREEQYNSTYRVVSVLTVLHQDWLNGKEYKCKVSNKALPAPIEKTISKAKGQPREPQVYTLPPSRDELTKNQVSLWCLVKGFYPSDIAVEWESYGTEWSNYKTTPPVLDSDGSFFLYSKLTVSKEEWQQGFVFSCSVLHEALHSHYTQKSLSLSPGK

SEQ ID NO: 2496 - protein, 217 aa, Artificial Sequence
  Description of Artificial Sequence: Synthetic polypeptide
  Synthetic Construct
APEAAGGPSVFLFPPKPKDTLMISRTPEVTCVVVDVSHEDPEVKFNWYVDGVEVHNAKTKPREEQYNSTYRVVSVLTVLHQDWLNGKEYKCKVSNKALPAPIEKTISKAKGQPREPQVYTLPPSRDELTKNQVSLWCLVKGFYPSDIAVEWESYGTEWSNYKTTPPVLDSDGSFFLYSKLTVSKEEWQQGFVFSCSVLHEALHSHYTQKSLSLSPGK

SEQ ID NO: 2497 - protein, 217 aa, Artificial Sequence
  Description of Artificial Sequence: Synthetic polypeptide
  Synthetic Construct
APEAAGGPSVFLFPPKPKDTLMISRTPEVTCVVVDVSHEDPEVKFNWYVDGVEVHNAKTKPREEQYNSTYRVVSVLTVLHQDWLNGKEYKCKVSNKALGAPIEKTISKAKGQPREPQVYTLPPSRDELTKNQVSLWCLVKGFYPSDIAVEWESYGTEWSNYKTTPPVLDSDGSFFLYSKLTVSKEEWQQGFVFSCSVLHEALHSHYTQKSLSLSPGK

SEQ ID NO: 2498 - protein, 217 aa, Artificial Sequence
  Description of Artificial Sequence: Synthetic polypeptide
  Synthetic Construct
APELLGGPSVFLFPPKPKDTLMISRTPEVTCVVVDVSHEDPEVKFNWYVDGVEVHNAKTKPREEQYNSTYRVVSVLTVLHQDWLNGKEYKCKVSNKALPAPIEKTISKAKGQPREPQVYTLPPSRDELTKNQVSLSCAVKGFYPSDIAVEWESYGTEWSNYKTTPPVLDSDGSFFLVSKLTVSKEEWQQGFVFSCSVLHEALHSHYTQKSLSLSPGK

SEQ ID NO: 2499 - protein, 217 aa, Artificial Sequence
  Description of Artificial Sequence: Synthetic polypeptide
  Synthetic Construct
APEAAGGPSVFLFPPKPKDTLMISRTPEVTCVVVDVSHEDPEVKFNWYVDGVEVHNAKTKPREEQYNSTYRVVSVLTVLHQDWLNGKEYKCKVSNKALPAPIEKTISKAKGQPREPQVYTLPPSRDELTKNQVSLSCAVKGFYPSDIAVEWESYGTEWSNYKTTPPVLDSDGSFFLVSKLTVSKEEWQQGFVFSCSVLHEALHSHYTQKSLSLSPGK

SEQ ID NO: 2500 - protein, 217 aa, Artificial Sequence
  Description of Artificial Sequence: Synthetic polypeptide
  Synthetic Construct
APEAAGGPSVFLFPPKPKDTLMISRTPEVTCVVVDVSHEDPEVKFNWYVDGVEVHNAKTKPREEQYNSTYRVVSVLTVLHQDWLNGKEYKCKVSNKALGAPIEKTISKAKGQPREPQVYTLPPSRDELTKNQVSLSCAVKGFYPSDIAVEWESYGTEWSNYKTTPPVLDSDGSFFLVSKLTVSKEEWQQGFVFSCSVLHEALHSHYTQKSLSLSPGK

SEQ ID NO: 2501 - protein, 217 aa, Artificial Sequence
  Description of Artificial Sequence: Synthetic polypeptide
  Synthetic Construct
APELLGGPSVFLFPPKPKDTLMISRTPEVTCVVVDVSHEDPEVKFNWYVDGVEVHNAKTKPREEQYNSTYRVVSVLTVLHQDWLNGKEYKCKVSNKALPAPIEKTISKAKGQPREPQVYTLPPSRDELTKNQVSLSCAVKGFYPSDIAVEWESNGQPENNYKTTPPVLDSDGSFFLVSKLTVDKSRWQQGNVFSCSVLHEALHSHYTQKSLSLSPGK

SEQ ID NO: 2502 - protein, 217 aa, Artificial Sequence
  Description of Artificial Sequence: Synthetic polypeptide
  Synthetic Construct
APEAAGGPSVFLFPPKPKDTLMISRTPEVTCVVVDVSHEDPEVKFNWYVDGVEVHNAKTKPREEQYNSTYRVVSVLTVLHQDWLNGKEYKCKVSNKALPAPIEKTISKAKGQPREPQVYTLPPSRDELTKNQVSLSCAVKGFYPSDIAVEWESNGQPENNYKTTPPVLDSDGSFFLVSKLTVDKSRWQQGNVFSCSVLHEALHSHYTQKSLSLSPGK

SEQ ID NO: 2503 - protein, 217 aa, Artificial Sequence
  Description of Artificial Sequence: Synthetic polypeptide
  Synthetic Construct
APELLGGPSVFLFPPKPKDTLMISRTPEVTCVVVDVSHEDPEVKFNWYVDGVEVHNAKTKPREEQYNSTYRVVSVLTVLHQDWLNGKEYKCKVSNKALPAPIEKTISKAKGQPREPQVYTLPPSRDELTKNQVSLWCLVKGFYPSDIAVEWESNGQPENNYKTTPPVLDSDGSFFLYSKLTVDKSRWQQGNVFSCSVLHEALHSHYTQKSLSLSPGK

SEQ ID NO: 2504 - protein, 217 aa, Artificial Sequence
  Description of Artificial Sequence: Synthetic polypeptide
  Synthetic Construct
APEAAGGPSVFLFPPKPKDTLMISRTPEVTCVVVDVSHEDPEVKFNWYVDGVEVHNAKTKPREEQYNSTYRVVSVLTVLHQDWLNGKEYKCKVSNKALPAPIEKTISKAKGQPREPQVYTLPPSRDELTKNQVSLWCLVKGFYPSDIAVEWESNGQPENNYKTTPPVLDSDGSFFLYSKLTVDKSRWQQGNVFSCSVLHEALHSHYTQKSLSLSPGK

SEQ ID NO: 2505 - protein, 193 aa, Artificial Sequence
  Description of Artificial Sequence: Synthetic polypeptide
  Synthetic Construct
MPALLSLVSLLSVLLMGCVAETGGSGHHHHHHSGTHNTTVFQGVAGQSLQVSCPYDSMKHWGRRKAWCRQLGEKGPCQRVVSTHNLWLLSFLRRWNGSTAITDDTLGGTLTITLRNLQPHDAGLYQCQSLHGSEADTLRKVLVEVLADPLDHRDAGDLWFPGESESFEDAHVEHSISRSLLEGEIPFPPTSAS

SEQ ID NO: 2506 - protein, 119 aa, Artificial Sequence
  Description of Artificial Sequence: Synthetic polypeptide
EVQLLESGGGLVQPGGSLRLSCAASGFTFSNYYMAWVRQAPGKGLEWVSSLTNSGGSTYYADSVKGRFTISRDNSKNTLYLQMNSLRAEDTAVYYCTREWAGSGYFDYWGQGTLVTVSS

SEQ ID NO: 2507 - protein, 107 aa, Artificial Sequence
  Description of Artificial Sequence: Synthetic polypeptide
DIQMTQSPSSLSASVGDRVTITCKASQNVGNNLAWYQQKPGKAPKLLIYYTSNRFTGVPSRFSGSGSGTDFTLTISSLQPEDFATYYCQRIYNSPWTFGQGTKLEIK

SEQ ID NO: 2508 - protein, 119 aa, Artificial Sequence; identical to SEQ ID NO: 2506
  Description of Artificial Sequence: Synthetic polypeptide

SEQ ID NO: 2509 - protein, 107 aa, Artificial Sequence
  Description of Artificial Sequence: Synthetic polypeptide
DIQMTQSPSSLSASVGDRVTMTCKASQNVGNNLAWYQQKPGKAPKLLLYYTSNRFTGVPSRFSGSGSGTDFTLTISSVQPEDFATYYCQRIYNSPWTFGQGTKLELK

SEQ ID NO: 2510 - protein, 119 aa, Artificial Sequence
  Description of Artificial Sequence: Synthetic polypeptide
EVQLLESGGGLVQPGGSLRLSCAASGFTFSNYYMAWVRQAPGKGLEWVASLTNSGGSTYYADSVKGRFTLSRDNSKNTLYLQMNSLRAEDTAVYYCTREWAGSGYFDYWGQGTLVTVSS

SEQ ID NO: 2511 - protein, 107 aa, Artificial Sequence; identical to SEQ ID NO: 2507
  Description of Artificial Sequence: Synthetic polypeptide

SEQ ID NO: 2512 - protein, 119 aa, Artificial Sequence
  Description of Artificial Sequence: Synthetic polypeptide
EVQLLESGGGLVQPGGSLRLSCAASGFTFSNYYMAWVRQAPGKGLEWVSSLTNSGGSTYYADSVKGRFTISRDNSKNTLYLQMNSLRAEDTAVYYCAKEWAGSGYFDYWGQGTLVTVSS

SEQ ID NO: 2513 - protein, 107 aa, Artificial Sequence; identical to SEQ ID NO: 2507
  Description of Artificial Sequence: Synthetic polypeptide

SEQ ID NO: 2514 - protein, 7 aa, Artificial Sequence
  Description of Artificial Sequence: Synthetic peptide
FSNYYMA

SEQ ID NO: 2515 - protein, 10 aa, Artificial Sequence
  Description of Artificial Sequence: Synthetic peptide
SLTNSGGSTY

SEQ ID NO: 2516 - protein, 7 aa, Artificial Sequence
  Description of Artificial Sequence: Synthetic peptide
EWAGSGY

SEQ ID NO: 2517 - protein, 7 aa, Artificial Sequence
  Description of Artificial Sequence: Synthetic peptide
NVGNNLA

SEQ ID NO: 2518 - protein, 7 aa, Artificial Sequence
  Description of Artificial Sequence: Synthetic peptide
YTSNRFT

SEQ ID NO: 2519 - protein, 7 aa, Artificial Sequence
  Description of Artificial Sequence: Synthetic peptide
RIYNSPW

SEQ ID NO: 2520 - DNA, 693 bp, Homo sapiens
atggagcctctccggctgctcatcttactctttgtcacagagctgtccggagcccacaacaccacagtgttccagggcgtggcgggccagtccctgcaggtgtcttgcccctatgactccatgaagcactgggggaggcgcaaggcctggtgccgccagctgggagagaagggcccatgccagcgtgtggtcagcacgcacaacttgtggctgctgtccttcctgaggaggtggaatgggagcacagccatcacagacgataccctgggtggcactctcaccattacgctgcggaatctacaaccccatgatgcgggtctctaccagtgccagagcctccatggcagtgaggctgacaccctcaggaaggtcctggtggaggtgctggcagaccccctggatcaccgggatgctggagatctctggttccccggggagtctgagagcttcgaggatgcccatgtggagcacagcatctccaggagcctcttggaaggagaaatccccttcccacccacttccatccttctcctcctggcctgcatctttctcatcaagattctagcagccagcgccctctgggctgcagcctggcatggacagaagccagggacacatccacccagtgaactggactgtggccatgacccagggtatcagctccaaactctgccagggctgagagacacgtga

SEQ ID NO: 2521 - protein, 227 aa, Mus musculus; identical to SEQ ID NO: 822

SEQ ID NO: 2522 - protein, 119 aa, Artificial Sequence; identical to SEQ ID NO: 2512
  Description of Artificial Sequence: Synthetic polypeptide

SEQ ID NO: 2523 - protein, 119 aa, Artificial Sequence; identical to SEQ ID NO: 2506
  Description of Artificial Sequence: Synthetic polypeptide

SEQ ID NO: 2524 - protein, 119 aa, Artificial Sequence; identical to SEQ ID NO: 2510
  Description of Artificial Sequence: Synthetic polypeptide

SEQ ID NO: 2525 - protein, 109 aa, Artificial Sequence
  Description of Artificial Sequence: Synthetic polypeptide
EVQLLESGGGLVQPGGSLRLSCAASGFTFSSYAMSWVRQAPGKGLEWVSAISGSGGSTYYADSVKGRFTISRDNSKNTLYLQMNSLRAEDTAVYYCAKWGQGTLVTVSS

SEQ ID NO: 2526 - protein, 107 aa, Artificial Sequence; identical to SEQ ID NO: 2507
  Description of Artificial Sequence: Synthetic polypeptide

SEQ ID NO: 2527 - protein, 107 aa, Artificial Sequence; identical to SEQ ID NO: 2509
  Description of Artificial Sequence: Synthetic polypeptide

SEQ ID NO: 2528 - protein, 106 aa, Artificial Sequence
  Description of Artificial Sequence: Synthetic polypeptide
DIQMTQSPSSLSASVGDRVTITCRASQSISSYLNWYQQKPGKAPKLLIYAASSLQSGVPSRFSGSGSGTDFTLTISSLQPEDFATYYCQQSYSTPPFGQGTKLEIK

SEQ ID NO: 2529 - protein, 449 aa, Artificial Sequence
  Description of Artificial Sequence: Synthetic polypeptide
EVQLLESGGGLVQPGGSLRLSCAASGFTFSNYYMAWVRQAPGKGLEWVSSLTNSGGSTYYADSVKGRFTISRDNSKNTLYLQMNSLRAEDTAVYYCTREWAGSGYFDYWGQGTLVTVSSASTKGPSVFPLAPSSKSTSGGTAALGCLVKDYFPEPVTVSWNSGALTSGVHTFPAVLQSSGLYSLSSVVTVPSSSLGTQTYICNVNHKPSNTKVDKKVEPKSCDKTHTCPPCPAPELLGGPSVFLFPPKPKDTLMISRTPEVTCVVVDVSHEDPEVKFNWYVDGVEVHNAKTKPREEQYNSTYRVVSVLTVLHQDWLNGKEYKCKVSNKALPAPIEKTISKAKGQPREPQVYTLPPSRDELTKNQVSLTCLVKGFYPSDIAVEWESNGQPENNYKTTPPVLDSDGSFFLYSKLTVDKSRWQQGNVFSCSVMHEALHNHYTQKSLSLSPGK

SEQ ID NO: 2530 - protein, 214 aa, Artificial Sequence
  Description of Artificial Sequence: Synthetic polypeptide
DIQMTQSPSSLSASVGDRVTITCKASQNVGNNLAWYQQKPGKAPKLLIYYTSNRFTGVPSRFSGSGSGTDFTLTISSLQPEDFATYYCQRIYNSPWTFGQGTKLEIKRTVAAPSVFIFPPSDEQLKSGTASVVCLLNNFYPREAKVQWKVDNALQSGNSQESVTEQDSKDSTYSLSSTLTLSKADYEKHKVYACEVTHQGLSSPVTKSFNRGEC

SEQ ID NO: 2531 - protein, 449 aa, Artificial Sequence; identical to SEQ ID NO: 2529
  Description of Artificial Sequence: Synthetic polypeptide

SEQ ID NO: 2532 - protein, 214 aa, Artificial Sequence
  Description of Artificial Sequence: Synthetic polypeptide
DIQMTQSPSSLSASVGDRVTMTCKASQNVGNNLAWYQQKPGKAPKLLLYYTSNRFTGVPSRFSGSGSGTDFTLTISSVQPEDFATYYCQRIYNSPWTFGQGTKLELKRTVAAPSVFIFPPSDEQLKSGTASVVCLLNNFYPREAKVQWKVDNALQSGNSQESVTEQDSKDSTYSLSSTLTLSKADYEKHKVYACEVTHQGLSSPVTKSFNRGEC

SEQ ID NO: 2533 - protein, 449 aa, Artificial Sequence
  Description of Artificial Sequence: Synthetic polypeptide
EVQLLESGGGLVQPGGSLRLSCAASGFTFSNYYMAWVRQAPGKGLEWVASLTNSGGSTYYADSVKGRFTLSRDNSKNTLYLQMNSLRAEDTAVYYCTREWAGSGYFDYWGQGTLVTVSSASTKGPSVFPLAPSSKSTSGGTAALGCLVKDYFPEPVTVSWNSGALTSGVHTFPAVLQSSGLYSLSSVVTVPSSSLGTQTYICNVNHKPSNTKVDKKVEPKSCDKTHTCPPCPAPELLGGPSVFLFPPKPKDTLMISRTPEVTCVVVDVSHEDPEVKFNWYVDGVEVHNAKTKPREEQYNSTYRVVSVLTVLHQDWLNGKEYKCKVSNKALPAPIEKTISKAKGQPREPQVYTLPPSRDELTKNQVSLTCLVKGFYPSDIAVEWESNGQPENNYKTTPPVLDSDGSFFLYSKLTVDKSRWQQGNVFSCSVMHEALHNHYTQKSLSLSPGK

SEQ ID NO: 2534 - protein, 214 aa, Artificial Sequence; identical to SEQ ID NO: 2530
  Description of Artificial Sequence: Synthetic polypeptide

SEQ ID NO: 2535 - protein, 449 aa, Artificial Sequence
  Description of Artificial Sequence: Synthetic polypeptide
EVQLLESGGGLVQPGGSLRLSCAASGFTFSNYYMAWVRQAPGKGLEWVSSLTNSGGSTYYADSVKGRFTISRDNSKNTLYLQMNSLRAEDTAVYYCAKEWAGSGYFDYWGQGTLVTVSSASTKGPSVFPLAPSSKSTSGGTAALGCLVKDYFPEPVTVSWNSGALTSGVHTFPAVLQSSGLYSLSSVVTVPSSSLGTQTYICNVNHKPSNTKVDKKVEPKSCDKTHTCPPCPAPELLGGPSVFLFPPKPKDTLMISRTPEVTCVVVDVSHEDPEVKFNWYVDGVEVHNAKTKPREEQYNSTYRVVSVLTVLHQDWLNGKEYKCKVSNKALPAPIEKTISKAKGQPREPQVYTLPPSRDELTKNQVSLTCLVKGFYPSDIAVEWESNGQPENNYKTTPPVLDSDGSFFLYSKLTVDKSRWQQGNVFSCSVMHEALHNHYTQKSLSLSPGK

SEQ ID NO: 2536 - protein, 214 aa, Artificial Sequence; identical to SEQ ID NO: 2530
  Description of Artificial Sequence: Synthetic polypeptide

SEQ ID NO: 2537 - protein, 451 aa, Artificial Sequence
  Description of Artificial Sequence: Synthetic polypeptide
EVQLVESGGGLVQPGRSLKLSCAASGFTFSNYYMAWVRQAPTKGLEWVASLTNSGGSTYYRDSVKGRFTLSRDNAKSTLYLQMDSLRSEDTATYYCTREWAGSGYFDYWGQGVMVTVSSAQTTAPSVYPLAPGCGDTTSSTVTLGCLVKGYFPEPVTVTWNSGALSSDVHTFPAVLQSGLYTLTSSVTSSTWPSQTVTCNVAHPASSTKVDKKVERRDGGIGHKCPTCPTCHKCPVPELLGGPSVFLFPPKPKDILLLSQNAKVTCVVVDVSEEEPDVQFSWFVNNVEVHTAQTQPREEQYNSTFRVVSALPLQHQDWMSGKEFKCKVNNKALPSPIEKTLSKPKGLVRKPQVYVMGPPTEQLTEQTVSLTCLTSGFLPNDIGVEWTSNGHIEKNYKNTEPVMDSDGSFFMYSKLNVERSRWDSRAPFVCSVVHEGLHNHHVEKSLSRPPG

SEQ ID NO: 2538 - protein, 214 aa, Artificial Sequence
  Description of Artificial Sequence: Synthetic polypeptide
NIVMTQSPKSMSLSVGDRVTMNCKASQNVGNNLAWYQQKPGQSPKLLLYYTSNRFTGVPDRFTGGGYGTDFTLTINSVQAEDAAFYYCQRIYNSPWTFGGGTKLELKRADAAPTVSIFPPSTEQLATGGASVVCLMNNFYPRDISVKWKIDGTERRDGVLDSVTDQDSKDSTYSMSSTLSLTKADYESHNLYTCEVVHKTSSSPVVKSFNRNEC

SEQ ID NO: 2539 - protein, 112 aa, Artificial Sequence
  Description of Artificial Sequence: Synthetic polypeptide
  SYNTHESIZED
DVVMTQTPLSLPVSLGDQAFISCRSSQNLVHSNGNTYLHWYLQKPGQSPKLLIYIVSNRFSGVPDRFSGSGSGTDFTLEISRVEAEDLGVYFCSQSTHVPLTFGAGTKLELK

SEQ ID NO: 2540 - protein, 116 aa, Artificial Sequence
  Description of Artificial Sequence: Synthetic polypeptide
  SYNTHESIZED
EVQLQQSGPDLVKPGASVKMSCKASGYTFTDYNIHWVKQSHGKTLEWIGYINPNTGGTYYNQKFKGKATMTVNKSSSTAYMELRSLTSEDSAVYYCVATRWDGVNWAQGTLVTVSA

SEQ ID NO: 2541 - protein, 11 aa, Artificial Sequence
  Description of Artificial Sequence: Synthetic peptide
  SYNTHESIZED
QNLVHSNGNTY

SEQ ID NO: 2542 - protein, 9 aa, Artificial Sequence
  Description of Artificial Sequence: Synthetic peptide
  SYNTHESIZED
SQSTHVPLT

SEQ ID NO: 2543 - protein, 8 aa, Artificial Sequence
  Description of Artificial Sequence: Synthetic peptide
  SYNTHESIZED
GYTFTDYN

SEQ ID NO: 2544 - protein, 8 aa, Artificial Sequence
  Description of Artificial Sequence: Synthetic peptide
  SYNTHESIZED
INPNTGGT

SEQ ID NO: 2545 - protein, 9 aa, Artificial Sequence
  Description of Artificial Sequence: Synthetic peptide
  SYNTHESIZED
VATRWDGVN

SEQ ID NO: 2546 - protein, 112 aa, Artificial Sequence; identical to SEQ ID NO: 1636
  Description of Artificial Sequence: Synthetic polypeptide
  SYNTHESIZED

SEQ ID NO: 2547 - protein, 116 aa, Artificial Sequence
  Description of Artificial Sequence: Synthetic polypeptide
  SYNTHESIZED
EVQLQQSGAELVKPGASVKLSCTSSGFNIKGYYIHWVKQRTEQGLEWIGRIDPEDGETKNAPKFQGKATFGTDTFSNTAYLRLSSLTSEDTGVYYCVRTETRGAYWGPGTLVTVSA

SEQ ID NO: 2548 - protein, 11 aa, Artificial Sequence
  Description of Artificial Sequence: Synthetic peptide
  SYNTHESIZED
QSLVHSNGNTY

SEQ ID NO: 2549 - protein, 9 aa, Artificial Sequence
  Description of Artificial Sequence: Synthetic peptide
  SYNTHESIZED
SQSTHVPLT

SEQ ID NO: 2550 - protein, 8 aa, Artificial Sequence
  Description of Artificial Sequence: Synthetic peptide
  SYNTHESIZED
GFNIKGYY

SEQ ID NO: 2551 - protein, 8 aa, Artificial Sequence
  Description of Artificial Sequence: Synthetic peptide
  SYNTHESIZED
IDPEDGET

SEQ ID NO: 2552 - protein, 9 aa, Artificial Sequence
  Description of Artificial Sequence: Synthetic peptide
  SYNTHESIZED
VRTETRGAY

SEQ ID NO: 2553 - protein, 112 aa, Artificial Sequence
  Description of Artificial Sequence: Synthetic polypeptide
  SYNTHESIZED
DVVMTQTPLSLPVSLGDQASISCRSSQSLVHSNGDTYLHWYLQKRGQSPKLLIYKVSNRFSGVPDRFSGSGSGTDFTLKISRVEAEDLGVYFCSQTTHVPLTFGAGTKLELK

SEQ ID NO: 2554 - protein, 116 aa, Artificial Sequence
  Description of Artificial Sequence: Synthetic polypeptide
  SYNTHESIZED
QVPLQQPGAEFVKPGASVKLSCKASAYTFTRYWMHWVKQRPGRGLEWIGRIDPNSGGTNYNEKFKSKATFTVDKPSSTSYMQLSSLTSEDSAVYFCVFTGTLFDYWGQGTTLTVSS

SEQ ID NO: 2555 - protein, 11 aa, Artificial Sequence
  Description of Artificial Sequence: Synthetic peptide
  SYNTHESIZED
QSLVHSNGDTY

SEQ ID NO: 2556 - protein, 9 aa, Artificial Sequence
  Description of Artificial Sequence: Synthetic peptide
  SYNTHESIZED
SQTTHVPLT

SEQ ID NO: 2557 - protein, 8 aa, Artificial Sequence
  Description of Artificial Sequence: Synthetic peptide
  SYNTHESIZED
AYTFTRYW

SEQ ID NO: 2558 - protein, 8 aa, Artificial Sequence
  Description of Artificial Sequence: Synthetic peptide
  SYNTHESIZED
IDPNSGGT

SEQ ID NO: 2559 - protein, 9 aa, Artificial Sequence
  Description of Artificial Sequence: Synthetic peptide
  VFTGTLFDY
VFTGTLFDY

SEQ ID NO: 2560 - protein, 112 aa, Artificial Sequence
  Description of Artificial Sequence: Synthetic polypeptide
  SYNTHESIZED
DVVMTQTPLSLPVSLGDQASISCKSSQSLVHSNGNTYLHWYLQKPGQSPKLLIYKVSNRFSGVPDRFSGSGSGTDFTLKISRVEAEDLGVYFCSQSTHVPPTFGGGTKLEIK

SEQ ID NO: 2561 - protein, 120 aa, Artificial Sequence
  Description of Artificial Sequence: Synthetic polypeptide
  SYNTHESIZED
EVQLQHSGPVLVKPGASVKMSCKSSGYTFTDYYLNWVKQSHGKSPEWIGVINPNTGSTSYNQKFKGKATLTVDKSSSTAYMDLNSLTSEDSAVYYCATHYYGSIYKQAWFAYWGQGTLVT

SEQ ID NO: 2562 - protein, 11 aa, Artificial Sequence
  Description of Artificial Sequence: Synthetic peptide
  SYNTHESIZED
QSLVHSNGNTY

SEQ ID NO: 2563 - protein, 9 aa, Artificial Sequence
  Description of Artificial Sequence: Synthetic peptide
  SYNTHESIZED
SQSTHVPPT

SEQ ID NO: 2564 - protein, 8 aa, Artificial Sequence
  Description of Artificial Sequence: Synthetic peptide
  SYNTHESIZED
GYTFTDYY

SEQ ID NO: 2565 - protein, 8 aa, Artificial Sequence
  Description of Artificial Sequence: Synthetic peptide
  SYNTHESIZED
INPNTGST

SEQ ID NO: 2566 - protein, 16 aa, Artificial Sequence
  Description of Artificial Sequence: Synthetic peptide
  SYNTHESIZED
ATHYYGSIYKQAWFAY

SEQ ID NO: 2567 - protein, 112 aa, Artificial Sequence
  Description of Artificial Sequence: Synthetic polypeptide
  SYNTHESIZED
DVVMTQTPLSLPVSLGDQASISCKSSQSLVHSNGNTYLHWYLQKPGQSPKLLIYKVSNRFSGVPDRFSGSGSGTDFTLKISRVEAEDLGIYFCSQSTHVPPTFGGGTKLEIK

SEQ ID NO: 2568 - protein, 121 aa, Artificial Sequence
  Description of Artificial Sequence: Synthetic polypeptide
  SYNTHESIZED
EVQLQHSGPVLVKPGASVKMSCKASGYTFTDYYMNWVKQSHGKSPEWIGVINPNTGSTSYNQKFKGKATLTVDKSSSTAYMDLNSLTSEDSAVYYCATHYYGSIYKQAWFAYWGQGTLVTV

SEQ ID NO: 2569 - protein, 11 aa, Artificial Sequence
  Description of Artificial Sequence: Synthetic peptide
  SYNTHESIZED
QSLVHSNGNTY

SEQ ID NO: 2570 - protein, 9 aa, Artificial Sequence
  Description of Artificial Sequence: Synthetic peptide
  SYNTHESIZED
SQSTHVPPT

SEQ ID NO: 2571 - protein, 8 aa, Artificial Sequence
  Description of Artificial Sequence: Synthetic peptide
  SYNTHESIZED
GYTFTDYY

SEQ ID NO: 2572 - protein, 8 aa, Artificial Sequence
  Description of Artificial Sequence: Synthetic peptide
  SYNTHESIZED
INPNTGST

SEQ ID NO: 2573 - protein, 16 aa, Artificial Sequence
  Description of Artificial Sequence: Synthetic peptide
  SYNTHESIZED
ATHYYGSIYKQAWFAY

SEQ ID NO: 2574 - protein, 113 aa, Artificial Sequence
  Description of Artificial Sequence: Synthetic polypeptide
  SYNTHESIZED
DIVMSQSPSSLAVSVGEKVTMSCKSSQSLLYSSNLKNYLAWFQQKPGQSPKLLIYWASIRESGVPDRFTGSGSGTDFTLTINSVKAEDLAVYYCQQYYTFPLTFGAGTKLELK

SEQ ID NO: 2575 - protein, 119 aa, Artificial Sequence
  Description of Artificial Sequence: Synthetic polypeptide
  SYNTHESIZED
EVQLVETGGGLVQPKGSLKLSCAASGFSFNINAMHWVRQAPGTGLKWVARIRSGSNDFATYYADSVKDRFTISRDDSHSMLYLQMNNLKTEDTAIYFCVREYVNYFVHWGQGTLVTVSA

SEQ ID NO: 2576 - protein, 12 aa, Artificial Sequence
  Description of Artificial Sequence: Synthetic peptide
  SYNTHESIZED
QSLLYSSNLKNY

SEQ ID NO: 2577 - protein, 9 aa, Artificial Sequence
  Description of Artificial Sequence: Synthetic peptide
  SYNTHESIZED
QQYYTFPLT

SEQ ID NO: 2578 - protein, 8 aa, Artificial Sequence
  Description of Artificial Sequence: Synthetic peptide
  SYNTHESIZED
GFSFNINA

SEQ ID NO: 2579 - protein, 10 aa, Artificial Sequence
  Description of Artificial Sequence: Synthetic peptide
  SYNTHESIZED
IRSGSNDFAT

SEQ ID NO: 2580 - protein, 10 aa, Artificial Sequence
  Description of Artificial Sequence: Synthetic peptide
  SYNTHESIZED
VREYVNYFVH

SEQ ID NO: 2581 - protein, 14 aa, Artificial Sequence
  Description of Artificial Sequence: Synthetic peptide
  SYNTHESIZED
DHRDAGDLWFPGES

SEQ ID NO: 2582 - protein, 11 aa, Artificial Sequence
  Description of Artificial Sequence: Synthetic peptide
  SYNTHESIZED
  MOD_RES (2)..(2): Ser, Thr, Asn, or Gln
  MOD_RES (9)..(9): Asp or Asn
QXLVHSNGXTY

SEQ ID NO: 2583 - protein, 9 aa, Artificial Sequence
  Description of Artificial Sequence: Synthetic peptide
  SYNTHESIZED
  MOD_RES (3)..(3): Ser, Thr, Asn, or Gln
  MOD_RES (8)..(8): Pro or Leu
SQXTHVPXT

SEQ ID NO: 2584 - protein, 219 aa, Homo sapiens; identical to SEQ ID NO: 1926

SEQ ID NO: 2585 - protein, 222 aa, Homo sapiens; identical to SEQ ID NO: 1927

SEQ ID NO: 2586 - protein, 10 aa, Artificial Sequence
  Description of Artificial Sequence: Synthetic peptide
GYTFTGYHMS

SEQ ID NO: 2587 - protein, 17 aa, Artificial Sequence
  Description of Artificial Sequence: Synthetic peptide
VINPVSGNTVYAQKFQG

SEQ ID NO: 2588 - protein, 10 aa, Artificial Sequence
  Description of Artificial Sequence: Synthetic peptide
IPSYTYAFDY

SEQ ID NO: 2589 - protein, 5 aa, Artificial Sequence
  Description of Artificial Sequence: Synthetic peptide
GYHMS

SEQ ID NO: 2590 - protein, 7 aa, Artificial Sequence
  Description of Artificial Sequence: Synthetic peptide
GYTFTGY

SEQ ID NO: 2591 - protein, 6 aa, Artificial Sequence
  Description of Artificial Sequence: Synthetic peptide
NPVSGN

SEQ ID NO: 2592 - protein, 8 aa, Artificial Sequence
  Description of Artificial Sequence: Synthetic peptide
GYTFTGYH

SEQ ID NO: 2593 - protein, 8 aa, Artificial Sequence
  Description of Artificial Sequence: Synthetic peptide
INPVSGNT

SEQ ID NO: 2594 - protein, 12 aa, Artificial Sequence
  Description of Artificial Sequence: Synthetic peptide
ARIPSYTYAFDY

SEQ ID NO: 2595 - protein, 119 aa, Artificial Sequence
  Description of Artificial Sequence: Synthetic polypeptide
QVQLVQSGAEVKKPGASVKVSCKASGYTFTGYHMSWVRQAPGQGLEWMGVINPVSGNTVYAQKFQGRVTMTRDTSISTAYMELSRLRSEDTAVYYCARIPSYTYAFDYWGQGTLVTVSS

SEQ ID NO: 2596 - DNA, 357 bp, Artificial Sequence
  Description of Artificial Sequence: Synthetic polynucleotide
caggtgcaattggtgcagagcggtgcggaagtgaaaaaaccgggtgccagcgtgaaagttagctgcaaagcgtccggatataccttcactggttaccatatgtcttgggtgcgccaggccccgggccagggcctcgagtggatgggcgttatcaacccggtttctggcaacacggtttacgcgcagaaatttcagggccgggtgaccatgacccgtgataccagcattagcaccgcgtatatggaactgagccgtctgcgtagcgaagatacggccgtgtattattgcgcgcgtatcccgtcttacacttacgctttcgattactggggccaaggcaccctggtgactgttagctca

SEQ ID NO: 2597 - protein, 449 aa, Artificial Sequence
  Description of Artificial Sequence: Synthetic polypeptide
QVQLVQSGAEVKKPGASVKVSCKASGYTFTGYHMSWVRQAPGQGLEWMGVINPVSGNTVYAQKFQGRVTMTRDTSISTAYMELSRLRSEDTAVYYCARIPSYTYAFDYWGQGTLVTVSSASTKGPSVFPLAPSSKSTSGGTAALGCLVKDYFPEPVTVSWNSGALTSGVHTFPAVLQSSGLYSLSSVVTVPSSSLGTQTYICNVNHKPSNTKVDKRVEPKSCDKTHTCPPCPAPEAAGGPSVFLFPPKPKDTLMISRTPEVTCVVVDVSHEDPEVKFNWYVDGVEVHNAKTKPREEQYNSTYRVVSVLTVLHQDWLNGKEYKCKVSNKALPAPIEKTISKAKGQPREPQVYTLPPSREEMTKNQVSLTCLVKGFYPSDIAVEWESNGQPENNYKTTPPVLDSDGSFFLYSKLTVDKSRWQQGNVFSCSVMHEALHNHYTQKSLSLSPGK

SEQ ID NO: 2598 - DNA, 1347 bp, Artificial Sequence
  Description of Artificial Sequence: Synthetic polynucleotide
caggtgcaattggtgcagagcggtgcggaagtgaaaaaaccgggtgccagcgtgaaagttagctgcaaagcgtccggatataccttcactggttaccatatgtcttgggtgcgccaggccccgggccagggcctcgagtggatgggcgttatcaacccggtttctggcaacacggtttacgcgcagaaatttcagggccgggtgaccatgacccgtgataccagcattagcaccgcgtatatggaactgagccgtctgcgtagcgaagatacggccgtgtattattgcgcgcgtatcccgtcttacacttacgctttcgattactggggccaaggcaccctggtgactgttagctcagcctccaccaagggtccatcggtcttccccctggcaccctcctccaagagcacctctgggggcacagcggccctgggctgcctggtcaaggactacttccccgaaccggtgacggtgtcgtggaactcaggcgccctgaccagcggcgtgcacaccttcccggctgtcctacagtcctcaggactctactccctcagcagcgtggtgaccgtgccctccagcagcttgggcacccagacctacatctgcaacgtgaatcacaagcccagcaacaccaaggtggacaagagagttgagcccaaatcttgtgacaaaactcacacatgcccaccgtgcccagcacctgaagcagcggggggaccgtcagtcttcctcttccccccaaaacccaaggacaccctcatgatctcccggacccctgaggtcacatgcgtggtggtggacgtgagccacgaagaccctgaggtcaagttcaactggtacgtggacggcgtggaggtgcataatgccaagacaaagccgcgggaggagcagtacaacagcacgtaccgggtggtcagcgtcctcaccgtcctgcaccaggactggctgaatggcaaggagtacaagtgcaaggtctccaacaaagccctcccagcccccatcgagaaaaccatctccaaagccaaagggcagccccgagaaccacaggtgtacaccctgcccccatcccgggaggagatgaccaagaaccaggtcagcctgacctgcctggtcaaaggcttctatcccagcgacatcgccgtggagtgggagagcaatgggcagccggagaacaactacaagaccacgcctcccgtgctggactccgacggctccttcttcctctacagcaagctcaccgtggacaagagcaggtggcagcaggggaacgtcttctcatgctccgtgatgcatgaggctctgcacaaccactacacgcagaagagcctctccctgtctccgggtaaa

SEQ ID NO: 2599 - protein, 11 aa, Artificial Sequence
  Description of Artificial Sequence: Synthetic peptide
RASQDISNYLA

SEQ ID NO: 2600 - protein, 7 aa, Artificial Sequence
  Description of Artificial Sequence: Synthetic peptide
RASSLQS

SEQ ID NO: 2601 - protein, 10 aa, Artificial Sequence
  Description of Artificial Sequence: Synthetic peptide
FQYRHMPSQT

SEQ ID NO: 2602 - protein, 7 aa, Artificial Sequence
  Description of Artificial Sequence: Synthetic peptide
SQDISNY

SEQ ID NO: 2603 - protein, 3 aa, Artificial Sequence
  Description of Artificial Sequence: Synthetic peptide
RAS

SEQ ID NO: 2604 - protein, 7 aa, Artificial Sequence
  Description of Artificial Sequence: Synthetic peptide
YRHMPSQ

SEQ ID NO: 2605 - protein, 6 aa, Artificial Sequence
  Description of Artificial Sequence: Synthetic peptide
QDISNY

SEQ ID NO: 2606 - protein, 108 aa, Artificial Sequence
  Description of Artificial Sequence: Synthetic polypeptide
DIQMTQSPSSLSASVGDRVTITCRASQDISNYLAWYQQKPGKAPKLLIYRASSLQSGVPSRFSGSGSGTDFTLTISSLQPEDFATYYCFQYRHMPSQTFGQGTKVEIK

SEQ ID NO: 2607 - DNA, 324 bp, Artificial Sequence
  Description of Artificial Sequence: Synthetic polynucleotide
gatatccagatgacccagagcccgagcagcctgagcgccagcgtgggcgatcgcgtgaccattacctgcagagccagccaggacatttctaactacctggcttggtaccagcagaaaccgggcaaagcgccgaaactattaatctaccgtgcttcttctctgcaaagcggcgtgccgagccgctttagcggcagcggatccggcaccgatttcaccctgaccattagctctctgcaaccggaagactttgcgacctattattgcttccagtaccgtcatatgccgtctcagacctttggccagggcacgaaagttgaaattaaa

SEQ ID NO: 2608 - protein, 215 aa, Artificial Sequence
  Description of Artificial Sequence: Synthetic polypeptide
DIQMTQSPSSLSASVGDRVTITCRASQDISNYLAWYQQKPGKAPKLLIYRASSLQSGVPSRFSGSGSGTDFTLTISSLQPEDFATYYCFQYRHMPSQTFGQGTKVEIKRTVAAPSVFIFPPSDEQLKSGTASVVCLLNNFYPREAKVQWKVDNALQSGNSQESVTEQDSKDSTYSLSSTLTLSKADYEKHKVYACEVTHQGLSSPVTKSFNRGEC

SEQ ID NO: 2609 - DNA, 645 bp, Artificial Sequence
  Description of Artificial Sequence: Synthetic polynucleotide
gatatccagatgacccagagcccgagcagcctgagcgccagcgtgggcgatcgcgtgaccattacctgcagagccagccaggacatttctaactacctggcttggtaccagcagaaaccgggcaaagcgccgaaactattaatctaccgtgcttcttctctgcaaagcggcgtgccgagccgctttagcggcagcggatccggcaccgatttcaccctgaccattagctctctgcaaccggaagactttgcgacctattattgcttccagtaccgtcatatgccgtctcagacctttggccagggcacgaaagttgaaattaaacgtacggtggccgctcccagcgtgttcatcttcccccccagcgacgagcagctgaagagcggcaccgccagcgtggtgtgcctgctgaacaacttctacccccgggaggccaaggtgcagtggaaggtggacaacgccctgcagagcggcaacagccaggaaagcgtcaccgagcaggacagcaaggactccacctacagcctgagcagcaccctgaccctgagcaaggccgactacgagaagcacaaggtgtacgcctgcgaggtgacccaccagggcctgtccagccccgtgaccaagagcttcaaccggggcgagtgt

SEQ ID NO: 2610 - DNA, 357 bp, Artificial Sequence
  Description of Artificial Sequence: Synthetic polynucleotide
caagtgcaactcgtgcagtcaggagccgaagtcaagaagcctggagcctcggtcaaggtgtcctgcaaggccagcggatacactttcactggataccacatgtcgtgggtcagacaggctcctggccaagggctggagtggatgggcgtcatcaacccggtgtcgggtaataccgtgtacgcccagaagttccagggtcgcgtgaccatgacccgggatacctccattagcaccgcgtacatggagctcagccggttgagatccgaggataccgccgtgtactactgtgcgcggatcccgtcctacacttacgccttcgactattggggccaggggactcttgtcaccgtgtcctcg

SEQ ID NO: 2611 - protein, 449 aa, Artificial Sequence
  Description of Artificial Sequence: Synthetic polypeptide
QVQLVQSGAEVKKPGASVKVSCKASGYTFTGYHMSWVRQAPGQGLEWMGVINPVSGNTVYAQKFQGRVTMTRDTSISTAYMELSRLRSEDTAVYYCARIPSYTYAFDYWGQGTLVTVSSASTKGPSVFPLAPSSKSTSGGTAALGCLVKDYFPEPVTVSWNSGALTSGVHTFPAVLQSSGLYSLSSVVTVPSSSLGTQTYICNVNHKPSNTKVDKRVEPKSCDKTHTCPPCPAPELLGGPSVFLFPPKPKDTLMISRTPEVTCVVVDVSHEDPEVKFNWYVDGVEVHNAKTKPREEQYNSTYRVVSVLTVLHQDWLNGKEYKCKVSNKALPAPIEKTISKAKGQPREPQVYTLPPSREEMTKNQVSLTCLVKGFYPSDIAVEWESNGQPENNYKTTPPVLDSDGSFFLYSKLTVDKSRWQQGNVFSCSVMHEALHNHYTQKSLSLSPGK

SEQ ID NO: 2612 - DNA, 1347 bp, Artificial Sequence
  Description of Artificial Sequence: Synthetic polynucleotide
caagtgcaactcgtgcagtcaggagccgaagtcaagaagcctggagcctcggtcaaggtgtcctgcaaggccagcggatacactttcactggataccacatgtcgtgggtcagacaggctcctggccaagggctggagtggatgggcgtcatcaacccggtgtcgggtaataccgtgtacgcccagaagttccagggtcgcgtgaccatgacccgggatacctccattagcaccgcgtacatggagctcagccggttgagatccgaggataccgccgtgtactactgtgcgcggatcccgtcctacacttacgccttcgactattggggccaggggactcttgtcaccgtgtcctcggcctccactaagggcccaagtgtgtttcccctggcccccagcagcaagtctacttccggcggaactgctgccctgggttgcctggtgaaggactacttccccgagcccgtgacagtgtcctggaactctggggctctgacttccggcgtgcacaccttccccgccgtgctgcagagcagcggcctgtacagcctgagcagcgtggtgacagtgccctccagctctctgggaacccagacctatatctgcaacgtgaaccacaagcccagcaacaccaaggtggacaagagagtggagcccaagagctgcgacaagacccacacctgccccccctgcccagctccagaactgctgggagggccttccgtgttcctgttcccccccaagcccaaggacaccctgatgatcagcaggacccccgaggtgacctgcgtggtggtggacgtgtcccacgaggacccagaggtgaagttcaactggtacgtggacggcgtggaggtgcacaacgccaagaccaagcccagagaggagcagtacaacagcacctacagggtggtgtccgtgctgaccgtgctgcaccaggactggctgaacggcaaagaatacaagtgcaaagtctccaacaaggccctgccagccccaatcgaaaagacaatcagcaaggccaagggccagccacgggagccccaggtgtacaccctgccccccagccgggaggagatgaccaagaaccaggtgtccctgacctgtctggtgaagggcttctaccccagcgatatcgccgtggagtgggagagcaacggccagcccgagaacaactacaagaccacccccccagtgctggacagcgacggcagcttcttcctgtacagcaagctgaccgtggacaagtccaggtggcagcagggcaacgtgttcagctgcagcgtgatgcacgaggccctgcacaaccactacacccagaagtccctgagcctgagccccggcaag

SEQ ID NO: 2613 - DNA, 324 bp, Artificial Sequence
  Description of Artificial Sequence: Synthetic polynucleotide
gacattcagatgacccagtccccgtcgtccctgtccgcatccgtgggcgacagagtcaccatcacttgccgggcctcacaggatatttccaactacctggcctggtatcagcagaagcctggaaaggccccgaagctgctgatctaccgggcgtcctccttgcaatcgggagtgccaagccgcttttctggttccgggagcgggactgacttcaccctgactattagcagcctgcagcccgaagatttcgctacctactactgcttccagtaccggcacatgccctcacaaaccttcggacagggcaccaaagtcgagatcaag

SEQ ID NO: 2614 - DNA, 645 bp, Artificial Sequence
  Description of Artificial Sequence: Synthetic polynucleotide
gacattcagatgacccagtccccgtcgtccctgtccgcatccgtgggcgacagagtcaccatcacttgccgggcctcacaggatatttccaactacctggcctggtatcagcagaagcctggaaaggccccgaagctgctgatctaccgggcgtcctccttgcaatcgggagtgccaagccgcttttctggttccgggagcgggactgacttcaccctgactattagcagcctgcagcccgaagatttcgctacctactactgcttccagtaccggcacatgccctcacaaaccttcggacagggcaccaaagtcgagatcaagcgtacggtggccgctcccagcgtgttcatcttcccccccagcgacgagcagctgaagagcggcaccgccagcgtggtgtgcctgctgaacaacttctacccccgggaggccaaggtgcagtggaaggtggacaacgccctgcagagcggcaacagccaggagagcgtcaccgagcaggacagcaaggactccacctacagcctgagcagcaccctgaccctgagcaaggccgactacgagaagcataaggtgtacgcctgcgaggtgacccaccagggcctgtccagccccgtgaccaagagcttcaacaggggcgagtgc

SEQ ID NO: 2615 - protein, 449 aa, Artificial Sequence
  Description of Artificial Sequence: Synthetic polypeptide
QVQLVQSGAEVKKPGASVKVSCKASGYTFTGYHMSWVRQAPGQGLEWMGVINPVSGNTVYAQKFQGRVTMTRDTSISTAYMELSRLRSEDTAVYYCARIPSYTYAFDYWGQGTLVTVSSASTKGPSVFPLAPSSKSTSGGTAALGCLVKDYFPEPVTVSWNSGALTSGVHTFPAVLQSSGLYSLSSVVTVPSSSLGTQTYICNVNHKPSNTKVDKRVEPKSCDKTHTCPPCPAPELLGGPSVFLFPPKPKDTLMISRTPEVTCVVVAVSHEDPEVKFNWYVDGVEVHNAKTKPREEQYNSTYRVVSVLTVLHQDWLNGKEYKCKVSNKALAAPIEKTISKAKGQPREPQVYTLPPSREEMTKNQVSLTCLVKGFYPSDIAVEWESNGQPENNYKTTPPVLDSDGSFFLYSKLTVDKSRWQQGNVFSCSVMHEALHNHYTQKSLSLSPGK

SEQ ID NO: 2616 - DNA, 1347 bp, Artificial Sequence
  Description of Artificial Sequence: Synthetic polynucleotide
caagtgcaactcgtgcagtcaggagccgaagtcaagaagcctggagcctcggtcaaggtgtcctgcaaggccagcggatacactttcactggataccacatgtcgtgggtcagacaggctcctggccaagggctggagtggatgggcgtcatcaacccggtgtcgggtaataccgtgtacgcccagaagttccagggtcgcgtgaccatgacccgggatacctccattagcaccgcgtacatggagctcagccggttgagatccgaggataccgccgtgtactactgtgcgcggatcccgtcctacacttacgccttcgactattggggccaggggactcttgtcaccgtgtcctcggcctccactaagggcccgtcagtgttcccccttgcgccatcctcgaagtcaacctccggaggaactgccgcactgggttgcctcgtgaaagactatttcccggaacccgtcactgtctcctggaactcaggagcgctcaccagcggagtgcatacctttcctgcggtgctgcagtccagcggcctgtactccctgagctccgtcgtgaccgtcccctcgtcgtccctgggaacccaaacctacatttgcaacgtcaatcacaagccaagcaacactaaggtggacaagagagtggagcccaagtcctgcgataagacccacacctgtcctccctgtccggcacctgaactgcttggtggaccttccgtgttcctgttcccgcccaagccaaaagacaccctgatgatctcccgcactccggaagtcacttgcgtggtcgtggccgtgtcccacgaggaccccgaggtcaagtttaattggtacgtggacggagtggaagtgcacaacgccaagaccaagccgcgggaagaacagtacaactccacctaccgcgtggtgtccgtcctgactgtgctccaccaggactggctgaacggaaaggagtacaagtgcaaagtgtccaacaaggcactggctgcccctatcgaaaagactatctccaaggccaagggccaacctagggagccccaggtgtacacgttgcctccttcccgcgaagaaatgactaagaaccaggtgtcgctgacctgtctcgtgaaagggttctacccctctgacatcgccgtggaatgggagtcaaacggacagcctgagaacaactataagaccacaccacctgtcctggactccgacggctccttcttcctgtactcaaagttgaccgtggacaagtcgcggtggcaacagggcaacgtgttctcttgctccgtgatgcacgaagccctgcacaaccactacacccaaaagtcgctcagcctctcccccggaaag

SEQ ID NO: 2617 - protein, 449 aa, Artificial Sequence
  Description of Artificial Sequence: Synthetic polypeptide
QVQLVQSGAEVKKPGASVKVSCKASGYTFTGYHMSWVRQAPGQGLEWMGVINPVSGNTVYAQKFQGRVTMTRDTSISTAYMELSRLRSEDTAVYYCARIPSYTYAFDYWGQGTLVTVSSASTKGPSVFPLAPSSKSTSGGTAALGCLVKDYFPEPVTVSWNSGALTSGVHTFPAVLQSSGLYSLSSVVTVPSSSLGTQTYICNVNHKPSNTKVDKRVEPKSCDKTHTCPPCPAPELLGGPSVFLFPPKPKDTLMISRTPEVTCVVVDVSHEDPEVKFNWYVDGVEVHNAKTKPREEQYNSTYRVVSVLTVLHQDWLNGKEYKCKVSNKALPAPIEKTISKAKGQPREPQVYTLPPSREEMTKNQVSLTCLVKGFYPSDIAVEWESNGQPENNYKTTPPVLDSDGSFFLYSKLTVDKSRWQQGNVFSCSVLHEALHSHYTQKSLSLSPGK

SEQ ID NO: 2618 - DNA, 1347 bp, Artificial Sequence
  Description of Artificial Sequence: Synthetic polynucleotide
caagtgcaactcgtgcagtcaggagccgaagtcaagaagcctggagcctcggtcaaggtgtcctgcaaggccagcggatacactttcactggataccacatgtcgtgggtcagacaggctcctggccaagggctggagtggatgggcgtcatcaacccggtgtcgggtaataccgtgtacgcccagaagttccagggtcgcgtgaccatgacccgggatacctccattagcaccgcgtacatggagctcagccggttgagatccgaggataccgccgtgtactactgtgcgcggatcccgtcctacacttacgccttcgactattggggccaggggactcttgtcaccgtgtcctcggcctccactaagggcccgtcagtgttcccccttgcgccatcctcgaagtcaacctccggaggaactgccgcactgggttgcctcgtgaaagactatttcccggaacccgtcactgtctcctggaactcaggagcgctcaccagcggagtgcatacctttcctgcggtgctgcagtccagcggcctgtactccctgagctccgtcgtgaccgtcccctcgtcgtccctgggaacccaaacctacatttgcaacgtcaatcacaagccaagcaacactaaggtggacaagagagtggagcccaagtcctgcgataagacccacacctgtcctccctgtccggcacctgaactgcttggtggaccttccgtgttcctgttcccgcccaagccaaaagacaccctgatgatctcccgcactccggaagtcacttgcgtggtcgtggacgtgtcccacgaggaccccgaggtcaagtttaattggtacgtggacggagtggaagtgcacaacgccaagaccaagccgcgggaagaacagtacaactccacctaccgcgtggtgtccgtcctgactgtgctccaccaggactggctgaacggaaaggagtacaagtgcaaagtgtccaacaaggcactgccagcccctatcgaaaagactatctccaaggccaagggccaacctagggagccccaggtgtacacgttgcctccttcccgcgaagaaatgactaagaaccaggtgtcgctgacctgtctcgtgaaagggttctacccctctgacatcgccgtggaatgggagtcaaacggacagcctgagaacaactataagaccacaccacctgtcctggactccgacggctccttcttcctgtactcaaagttgaccgtggacaagtcgcggtggcaacagggcaacgtgttctcttgctccgtgctgcacgaagccctgcacagccactacacccaaaagtcgctcagcctctcccccggaaag

SEQ ID NO: 2619 - protein, 449 aa, Artificial Sequence
  Description of Artificial Sequence: Synthetic polypeptide
QVQLVQSGAEVKKPGASVKVSCKASGYTFTGYHMSWVRQAPGQGLEWMGVINPVSGNTVYAQKFQGRVTMTRDTSISTAYMELSRLRSEDTAVYYCARIPSYTYAFDYWGQGTLVTVSSASTKGPSVFPLAPSSKSTSGGTAALGCLVKDYFPEPVTVSWNSGALTSGVHTFPAVLQSSGLYSLSSVVTVPSSSLGTQTYICNVNHKPSNTKVDKRVEPKSCDKTHTCPPCPAPELLGGPSVFLFPPKPKDTLMISRTPEVTCVVVAVSHEDPEVKFNWYVDGVEVHNAKTKPREEQYNSTYRVVSVLTVLHQDWLNGKEYKCKVSNKALAAPIEKTISKAKGQPREPQVYTLPPSREEMTKNQVSLTCLVKGFYPSDIAVEWESNGQPENNYKTTPPVLDSDGSFFLYSKLTVDKSRWQQGNVFSCSVLHEALHSHYTQKSLSLSPGK

SEQ ID NO: 2620 - DNA, 1347 bp, Artificial Sequence
  Description of Artificial Sequence: Synthetic polynucleotide
caagtgcaactcgtgcagtcaggagccgaagtcaagaagcctggagcctcggtcaaggtgtcctgcaaggccagcggatacactttcactggataccacatgtcgtgggtcagacaggctcctggccaagggctggagtggatgggcgtcatcaacccggtgtcgggtaataccgtgtacgcccagaagttccagggtcgcgtgaccatgacccgggatacctccattagcaccgcgtacatggagctcagccggttgagatccgaggataccgccgtgtactactgtgcgcggatcccgtcctacacttacgccttcgactattggggccaggggactcttgtcaccgtgtcctcggcctccactaagggcccgtcagtgttcccccttgcgccatcctcgaagtcaacctccggaggaactgccgcactgggttgcctcgtgaaagactatttcccggaacccgtcactgtctcctggaactcaggagcgctcaccagcggagtgcatacctttcctgcggtgctgcagtccagcggcctgtactccctgagctccgtcgtgaccgtcccctcgtcgtccctgggaacccaaacctacatttgcaacgtcaatcacaagccaagcaacactaaggtggacaagagagtggagcccaagtcctgcgataagacccacacctgtcctccctgtccggcacctgaactgcttggtggaccttccgtgttcctgttcccgcccaagccaaaagacaccctgatgatctcccgcactccggaagtcacttgcgtggtcgtggccgtgtcccacgaggaccccgaggtcaagtttaattggtacgtggacggagtggaagtgcacaacgccaagaccaagccgcgggaagaacagtacaactccacctaccgcgtggtgtccgtcctgactgtgctccaccaggactggctgaacggaaaggagtacaagtgcaaagtgtccaacaaggcactggctgcccctatcgaaaagactatctccaaggccaagggccaacctagggagccccaggtgtacacgttgcctccttcccgcgaagaaatgactaagaaccaggtgtcgctgacctgtctcgtgaaagggttctacccctctgacatcgccgtggaatgggagtcaaacggacagcctgagaacaactataagaccacaccacctgtcctggactccgacggctccttcttcctgtactcaaagttgaccgtggacaagtcgcggtggcaacagggcaacgtgttctcttgctccgtgctgcacgaagccctgcacagccactacacccaaaagtcgctcagcctctcccccggaaag

SEQ ID NO: 2621 - protein, 449 aa, Artificial Sequence
  Description of Artificial Sequence: Synthetic polypeptide
QVQLVQSGAEVKKPGASVKVSCKASGYTFTGYHMSWVRQAPGQGLEWMGVINPVSGNTVYAQKFQGRVTMTRDTSISTAYMELSRLRSEDTAVYYCARIPSYTYAFDYWGQGTLVTVSSASTKGPSVFPLAPSSKSTSGGTAALGCLVKDYFPEPVTVSWNSGALTSGVHTFPAVLQSSGLYSLSSVVTVPSSSLGTQTYICNVNHKPSNTKVDKRVEPKSCDKTHTCPPCPAPELLGGPSVFLFPPKPKDTLYITREPEVTCVVVDVSHEDPEVKFNWYVDGVEVHNAKTKPREEQYNSTYRVVSVLTVLHQDWLNGKEYKCKVSNKALPAPIEKTISKAKGQPREPQVYTLPPSREEMTKNQVSLTCLVKGFYPSDIAVEWESNGQPENNYKTTPPVLDSDGSFFLYSKLTVDKSRWQQGNVFSCSVMHEALHNHYTQKSLSLSPGK

SEQ ID NO: 2622 - DNA, 1347 bp, Artificial Sequence
  Description of Artificial Sequence: Synthetic polynucleotide
caagtgcaactcgtgcagtcaggagccgaagtcaagaagcctggagcctcggtcaaggtgtcctgcaaggccagcggatacactttcactggataccacatgtcgtgggtcagacaggctcctggccaagggctggagtggatgggcgtcatcaacccggtgtcgggtaataccgtgtacgcccagaagttccagggtcgcgtgaccatgacccgggatacctccattagcaccgcgtacatggagctcagccggttgagatccgaggataccgccgtgtactactgtgcgcggatcccgtcctacacttacgccttcgactattggggccaggggactcttgtcaccgtgtcctcggcctccactaagggcccgtcagtgttcccccttgcgccatcctcgaagtcaacctccggaggaactgccgcactgggttgcctcgtgaaagactatttcccggaacccgtcactgtctcctggaactcaggagcgctcaccagcggagtgcatacctttcctgcggtgctgcagtccagcggcctgtactccctgagctccgtcgtgaccgtcccctcgtcgtccctgggaacccaaacctacatttgcaacgtcaatcacaagccaagcaacactaaggtggacaagagagtggagcccaagtcctgcgataagacccacacctgtcctccctgtccggcacctgaactgcttggtggaccttccgtgttcctgttcccgcccaagccaaaagacaccctgtatatcactcgcgaaccggaagtcacttgcgtggtcgtggacgtgtcccacgaggaccccgaggtcaagtttaattggtacgtggacggagtggaagtgcacaacgccaagaccaagccgcgggaagaacagtacaactccacctaccgcgtggtgtccgtcctgactgtgctccaccaggactggctgaacggaaaggagtacaagtgcaaagtgtccaacaaggcactgccagcccctatcgaaaagactatctccaaggccaagggccaacctagggagccccaggtgtacacgttgcctccttcccgcgaagaaatgactaagaaccaggtgtcgctgacctgtctcgtgaaagggttctacccctctgacatcgccgtggaatgggagtcaaacggacagcctgagaacaactataagaccacaccacctgtcctggactccgacggctccttcttcctgtactcaaagttgaccgtggacaagtcgcggtggcaacagggcaacgtgttctcttgctccgtgatgcacgaagccctgcacaaccactacacccaaaagtcgctcagcctctcccccggaaag

SEQ ID NO: 2623 - protein, 12 aa, Artificial Sequence
  Description of Artificial Sequence: Synthetic peptide
GDSVSSSSAAWN

SEQ ID NO: 2624 - protein, 18 aa, Artificial Sequence
  Description of Artificial Sequence: Synthetic peptide
HIGYRSKWYNEYAVSVKS

SEQ ID NO: 2625 - protein, 16 aa, Artificial Sequence
  Description of Artificial Sequence: Synthetic peptide
GMYGSVPYKEGYYFDI

SEQ ID NO: 2626 - protein, 7 aa, Artificial Sequence
  Description of Artificial Sequence: Synthetic peptide
SSSAAWN

SEQ ID NO: 2627 - protein, 9 aa, Artificial Sequence
  Description of Artificial Sequence: Synthetic peptide
GDSVSSSSA

SEQ ID NO: 2628 - protein, 7 aa, Artificial Sequence
  Description of Artificial Sequence: Synthetic peptide
GYRSKWY

SEQ ID NO: 2629 - protein, 10 aa, Artificial Sequence
  Description of Artificial Sequence: Synthetic peptide
GDSVSSSSAA

SEQ ID NO: 2630 - protein, 9 aa, Artificial Sequence
  Description of Artificial Sequence: Synthetic peptide
IGYRSKWYN

SEQ ID NO: 2631 - protein, 18 aa, Artificial Sequence
  Description of Artificial Sequence: Synthetic peptide
ARGMYGSVPYKEGYYFDI

SEQ ID NO: 2632 - protein, 128 aa, Artificial Sequence
  Description of Artificial Sequence: Synthetic polypeptide
QVQLQQSGPGLVKPSQTLSLTCAISGDSVSSSSAAWNWIRQSPSRGLEWLGHIGYRSKWYNEYAVSVKSRITINPDTSKNQFSLQLNSVTPEDTAVYYCARGMYGSVPYKEGYYFDIWGQGTLVTVSS

SEQ ID NO: 2633 - DNA, 384 bp, Artificial Sequence
  Description of Artificial Sequence: Synthetic polynucleotide
caggtgcaattgcagcagagcggtccgggcctggtgaaaccgagccagaccctgagcctgacctgcgcgatttccggagatagcgtgagctcttcttctgctgcttggaactggattcgtcagagcccgagccgtggcctcgagtggctgggccatatcggttaccgtagcaaatggtacaacgaatatgccgtgagcgtgaaaagccgcattaccattaacccggatacttcgaaaaaccagtttagcctgcaactgaacagcgtgaccccggaagatacggccgtgtattattgcgcgcgtggtatgtacggttctgttccctacaaagaaggttactacttcgatatttggggccaaggcaccctggtgactgttagctca

SEQ ID NO: 2634 - protein, 458 aa, Artificial Sequence
  Description of Artificial Sequence: Synthetic polypeptide
QVQLQQSGPGLVKPSQTLSLTCAISGDSVSSSSAAWNWIRQSPSRGLEWLGHIGYRSKWYNEYAVSVKSRITINPDTSKNQFSLQLNSVTPEDTAVYYCARGMYGSVPYKEGYYFDIWGQGTLVTVSSASTKGPSVFPLAPSSKSTSGGTAALGCLVKDYFPEPVTVSWNSGALTSGVHTFPAVLQSSGLYSLSSVVTVPSSSLGTQTYICNVNHKPSNTKVDKRVEPKSCDKTHTCPPCPAPEAAGGPSVFLFPPKPKDTLMISRTPEVTCVVVDVSHEDPEVKFNWYVDGVEVHNAKTKPREEQYNSTYRVVSVLTVLHQDWLNGKEYKCKVSNKALPAPIEKTISKAKGQPREPQVYTLPPSREEMTKNQVSLTCLVKGFYPSDIAVEWESNGQPENNYKTTPPVLDSDGSFFLYSKLTVDKSRWQQGNVFSCSVMHEALHNHYTQKSLSLSPGK

SEQ ID NO: 2635 - DNA, 1374 bp, Artificial Sequence
  Description of Artificial Sequence: Synthetic polynucleotide
caggtgcaattgcagcagagcggtccgggcctggtgaaaccgagccagaccctgagcctgacctgcgcgatttccggagatagcgtgagctcttcttctgctgcttggaactggattcgtcagagcccgagccgtggcctcgagtggctgggccatatcggttaccgtagcaaatggtacaacgaatatgccgtgagcgtgaaaagccgcattaccattaacccggatacttcgaaaaaccagtttagcctgcaactgaacagcgtgaccccggaagatacggccgtgtattattgcgcgcgtggtatgtacggttctgttccctacaaagaaggttactacttcgatatttggggccaaggcaccctggtgactgttagctcagcctccaccaagggtccatcggtcttccccctggcaccctcctccaagagcacctctgggggcacagcggccctgggctgcctggtcaaggactacttccccgaaccggtgacggtgtcgtggaactcaggcgccctgaccagcggcgtgcacaccttcccggctgtcctacagtcctcaggactctactccctcagcagcgtggtgaccgtgccctccagcagcttgggcacccagacctacatctgcaacgtgaatcacaagcccagcaacaccaaggtggacaagagagttgagcccaaatcttgtgacaaaactcacacatgcccaccgtgcccagcacctgaagcagcggggggaccgtcagtcttcctcttccccccaaaacccaaggacaccctcatgatctcccggacccctgaggtcacatgcgtggtggtggacgtgagccacgaagaccctgaggtcaagttcaactggtacgtggacggcgtggaggtgcataatgccaagacaaagccgcgggaggagcagtacaacagcacgtaccgggtggtcagcgtcctcaccgtcctgcaccaggactggctgaatggcaaggagtacaagtgcaaggtctccaacaaagccctcccagcccccatcgagaaaaccatctccaaagccaaagggcagccccgagaaccacaggtgtacaccctgcccccatcccgggaggagatgaccaagaaccaggtcagcctgacctgcctggtcaaaggcttctatcccagcgacatcgccgtggagtgggagagcaatgggcagccggagaacaactacaagaccacgcctcccgtgctggactccgacggctccttcttcctctacagcaagctcaccgtggacaagagcaggtggcagcaggggaacgtcttctcatgctccgtgatgcatgaggctctgcacaaccactacacgcagaagagcctctccctgtctccgggtaaa

SEQ ID NO: 2636 - protein, 11 aa, Artificial Sequence
  Description of Artificial Sequence: Synthetic peptide
RASQGISSDLN

SEQ ID NO: 2637 - protein, 7 aa, Artificial Sequence
  Description of Artificial Sequence: Synthetic peptide
AASNLQS

SEQ ID NO: 2638 - protein, 9 aa, Artificial Sequence
  Description of Artificial Sequence: Synthetic peptide
QQYTDESMT

SEQ ID NO: 2639 - protein, 7 aa, Artificial Sequence
  Description of Artificial Sequence: Synthetic peptide
SQGISSD

SEQ ID NO: 2640 - protein, 3 aa, Artificial Sequence
  Description of Artificial Sequence: Synthetic peptide
AAS

SEQ ID NO: 2641 - protein, 6 aa, Artificial Sequence
  Description of Artificial Sequence: Synthetic peptide
YTDESM

SEQ ID NO: 2642 - protein, 6 aa, Artificial Sequence
  Description of Artificial Sequence: Synthetic peptide
QGISSD

SEQ ID NO: 2643 - protein, 107 aa, Artificial Sequence
  Description of Artificial Sequence: Synthetic polypeptide
DIQMTQSPSSLSASVGDRVTITCRASQGISSDLNWYQQKPGKAPKLLIYAASNLQSGVPSRFSGSGSGTDFTLTISSLQPEDFATYYCQQYTDESMTFGQGTKVEIK

SEQ ID NO: 2644 - DNA, 321 bp, Artificial Sequence
  Description of Artificial Sequence: Synthetic polynucleotide
gatatccagatgacccagagcccgagcagcctgagcgccagcgtgggcgatcgcgtgaccattacctgcagagccagccagggtatttcttctgacctgaactggtaccagcagaaaccgggcaaagcgccgaaactattaatctacgctgcttctaacctgcaaagcggcgtgccgagccgctttagcggcagcggatccggcaccgatttcaccctgaccattagctctctgcaaccggaagactttgcgacctattattgccagcagtacactgacgaatctatgacctttggccagggcacgaaagttgaaattaaa

SEQ ID NO: 2645 - protein, 214 aa, Artificial Sequence
  Description of Artificial Sequence: Synthetic polypeptide
DIQMTQSPSSLSASVGDRVTITCRASQGISSDLNWYQQKPGKAPKLLIYAASNLQSGVPSRFSGSGSGTDFTLTISSLQPEDFATYYCQQYTDESMTFGQGTKVEIKRTVAAPSVFIFPPSDEQLKSGTASVVCLLNNFYPREAKVQWKVDNALQSGNSQESVTEQDSKDSTYSLSSTLTLSKADYEKHKVYACEVTHQGLSSPVTKSFNRGEC

SEQ ID NO: 2646 - DNA, 642 bp, Artificial Sequence
  Description of Artificial Sequence: Synthetic polynucleotide
gatatccagatgacccagagcccgagcagcctgagcgccagcgtgggcgatcgcgtgaccattacctgcagagccagccagggtatttcttctgacctgaactggtaccagcagaaaccgggcaaagcgccgaaactattaatctacgctgcttctaacctgcaaagcggcgtgccgagccgctttagcggcagcggatccggcaccgatttcaccctgaccattagctctctgcaaccggaagactttgcgacctattattgccagcagtacactgacgaatctatgacctttggccagggcacgaaagttgaaattaaacgtacggtggccgctcccagcgtgttcatcttcccccccagcgacgagcagctgaagagcggcaccgccagcgtggtgtgcctgctgaacaacttctacccccgggaggccaaggtgcagtggaaggtggacaacgccctgcagagcggcaacagccaggaaagcgtcaccgagcaggacagcaaggactccacctacagcctgagcagcaccctgaccctgagcaaggccgactacgagaagcacaaggtgtacgcctgcgaggtgacccaccagggcctgtccagccccgtgaccaagagcttcaaccggggcgagtgt

SEQ ID NO: 2647 - DNA, 384 bp, Artificial Sequence
  Description of Artificial Sequence: Synthetic polynucleotide
caagtgcaactccagcagtcaggaccggggttggtcaagccttcgcagaccctgtccctcacttgcgccattagcggagattcggtgtcgtcgtcgtcagccgcctggaactggattagacagtccccttcccgagggctggagtggctgggccacatcggataccgcagcaagtggtacaacgaatacgccgtcagcgtgaagtcacgcatcaccatcaacccggatactagcaagaaccagttcagcctccagttgaactccgtgaccccggaggataccgccgtgtactactgtgcgcggggcatgtacggatccgtgccgtacaaggagggatactacttcgacatttggggccaggggactcttgtcaccgtgtcctcg

SEQ ID NO: 2648 - protein, 458 aa, Artificial Sequence
  Description of Artificial Sequence: Synthetic polypeptide
QVQLQQSGPGLVKPSQTLSLTCAISGDSVSSSSAAWNWIRQSPSRGLEWLGHIGYRSKWYNEYAVSVKSRITINPDTSKNQFSLQLNSVTPEDTAVYYCARGMYGSVPYKEGYYFDIWGQGTLVTVSSASTKGPSVFPLAPSSKSTSGGTAALGCLVKDYFPEPVTVSWNSGALTSGVHTFPAVLQSSGLYSLSSVVTVPSSSLGTQTYICNVNHKPSNTKVDKRVEPKSCDKTHTCPPCPAPELLGGPSVFLFPPKPKDTLMISRTPEVTCVVVDVSHEDPEVKFNWYVDGVEVHNAKTKPREEQYNSTYRVVSVLTVLHQDWLNGKEYKCKVSNKALPAPIEKTISKAKGQPREPQVYTLPPSREEMTKNQVSLTCLVKGFYPSDIAVEWESNGQPENNYKTTPPVLDSDGSFFLYSKLTVDKSRWQQGNVFSCSVMHEALHNHYTQKSLSLSPGK

SEQ ID NO: 2649 - DNA, 1374 bp, Artificial Sequence
  Description of Artificial Sequence: Synthetic polynucleotide
caagtgcaactccagcagtcaggaccggggttggtcaagccttcgcagaccctgtccctcacttgcgccattagcggagattcggtgtcgtcgtcgtcagccgcctggaactggattagacagtccccttcccgagggctggagtggctgggccacatcggataccgcagcaagtggtacaacgaatacgccgtcagcgtgaagtcacgcatcaccatcaacccggatactagcaagaaccagttcagcctccagttgaactccgtgaccccggaggataccgccgtgtactactgtgcgcggggcatgtacggatccgtgccgtacaaggagggatactacttcgacatttggggccaggggactcttgtcaccgtgtcctcggcctccactaagggcccaagtgtgtttcccctggcccccagcagcaagtctacttccggcggaactgctgccctgggttgcctggtgaaggactacttccccgagcccgtgacagtgtcctggaactctggggctctgacttccggcgtgcacaccttccccgccgtgctgcagagcagcggcctgtacagcctgagcagcgtggtgacagtgccctccagctctctgggaacccagacctatatctgcaacgtgaaccacaagcccagcaacaccaaggtggacaagagagtggagcccaagagctgcgacaagacccacacctgccccccctgcccagctccagaactgctgggagggccttccgtgttcctgttcccccccaagcccaaggacaccctgatgatcagcaggacccccgaggtgacctgcgtggtggtggacgtgtcccacgaggacccagaggtgaagttcaactggtacgtggacggcgtggaggtgcacaacgccaagaccaagcccagagaggagcagtacaacagcacctacagggtggtgtccgtgctgaccgtgctgcaccaggactggctgaacggcaaagaatacaagtgcaaagtctccaacaaggccctgccagccccaatcgaaaagacaatcagcaaggccaagggccagccacgggagccccaggtgtacaccctgccccccagccgggaggagatgaccaagaaccaggtgtccctgacctgtctggtgaagggcttctaccccagcgatatcgccgtggagtgggagagcaacggccagcccgagaacaactacaagaccacccccccagtgctggacagcgacggcagcttcttcctgtacagcaagctgaccgtggacaagtccaggtggcagcagggcaacgtgttcagctgcagcgtgatgcacgaggccctgcacaaccactacacccagaagtccctgagcctgagccccggcaag

SEQ ID NO: 2650 - DNA, 321 bp, Artificial Sequence
  Description of Artificial Sequence: Synthetic polynucleotide
gacattcagatgacccagtccccgtcgtccctgtccgcatccgtgggcgacagagtcaccatcacttgccgggcctcacagggaatttcctccgacctgaactggtatcagcagaagcctggaaaggccccgaagctgctgatctacgccgcgtccaacttgcaatcgggagtgccaagccgcttttctggttccgggagcgggactgacttcaccctgactattagcagcctgcagcccgaagatttcgctacctactactgccaacagtacacagatgaatccatgaccttcggacagggcaccaaagtcgagatcaag

SEQ ID NO: 2651 - DNA, 642 bp, Artificial Sequence
  Description of Artificial Sequence: Synthetic polynucleotide
gacattcagatgacccagtccccgtcgtccctgtccgcatccgtgggcgacagagtcaccatcacttgccgggcctcacagggaatttcctccgacctgaactggtatcagcagaagcctggaaaggccccgaagctgctgatctacgccgcgtccaacttgcaatcgggagtgccaagccgcttttctggttccgggagcgggactgacttcaccctgactattagcagcctgcagcccgaagatttcgctacctactactgccaacagtacacagatgaatccatgaccttcggacagggcaccaaagtcgagatcaagcgtacggtggccgctcccagcgtgttcatcttcccccccagcgacgagcagctgaagagcggcaccgccagcgtggtgtgcctgctgaacaacttctacccccgggaggccaaggtgcagtggaaggtggacaacgccctgcagagcggcaacagccaggagagcgtcaccgagcaggacagcaaggactccacctacagcctgagcagcaccctgaccctgagcaaggccgactacgagaagcataaggtgtacgcctgcgaggtgacccaccagggcctgtccagccccgtgaccaagagcttcaacaggggcgagtgc

SEQ ID NO: 2652 - protein, 458 aa, Artificial Sequence
  Description of Artificial Sequence: Synthetic polypeptide
QVQLQQSGPGLVKPSQTLSLTCAISGDSVSSSSAAWNWIRQSPSRGLEWLGHIGYRSKWYNEYAVSVKSRITINPDTSKNQFSLQLNSVTPEDTAVYYCARGMYGSVPYKEGYYFDIWGQGTLVTVSSASTKGPSVFPLAPSSKSTSGGTAALGCLVKDYFPEPVTVSWNSGALTSGVHTFPAVLQSSGLYSLSSVVTVPSSSLGTQTYICNVNHKPSNTKVDKRVEPKSCDKTHTCPPCPAPELLGGPSVFLFPPKPKDTLMISRTPEVTCVVVAVSHEDPEVKFNWYVDGVEVHNAKTKPREEQYNSTYRVVSVLTVLHQDWLNGKEYKCKVSNKALAAPIEKTISKAKGQPREPQVYTLPPSREEMTKNQVSLTCLVKGFYPSDIAVEWESNGQPENNYKTTPPVLDSDGSFFLYSKLTVDKSRWQQGNVFSCSVMHEALHNHYTQKSLSLSPGK

SEQ ID NO: 2653 - DNA, 1374 bp, Artificial Sequence
  Description of Artificial Sequence: Synthetic polynucleotide
caagtgcaactccagcagtcaggaccggggttggtcaagccttcgcagaccctgtccctcacttgcgccattagcggagattcggtgtcgtcgtcgtcagccgcctggaactggattagacagtccccttcccgagggctggagtggctgggccacatcggataccgcagcaagtggtacaacgaatacgccgtcagcgtgaagtcacgcatcaccatcaacccggatactagcaagaaccagttcagcctccagttgaactccgtgaccccggaggataccgccgtgtactactgtgcgcggggcatgtacggatccgtgccgtacaaggagggatactacttcgacatttggggccaggggactcttgtcaccgtgtcctcggcctccactaagggcccgtcagtgttcccccttgcgccatcctcgaagtcaacctccggaggaactgccgcactgggttgcctcgtgaaagactatttcccggaacccgtcactgtctcctggaactcaggagcgctcaccagcggagtgcatacctttcctgcggtgctgcagtccagcggcctgtactccctgagctccgtcgtgaccgtcccctcgtcgtccctgggaacccaaacctacatttgcaacgtcaatcacaagccaagcaacactaaggtggacaagagagtggagcccaagtcctgcgataagacccacacctgtcctccctgtccggcacctgaactgcttggtggaccttccgtgttcctgttcccgcccaagccaaaagacaccctgatgatctcccgcactccggaagtcacttgcgtggtcgtggccgtgtcccacgaggaccccgaggtcaagtttaattggtacgtggacggagtggaagtgcacaacgccaagaccaagccgcgggaagaacagtacaactccacctaccgcgtggtgtccgtcctgactgtgctccaccaggactggctgaacggaaaggagtacaagtgcaaagtgtccaacaaggcactggctgcccctatcgaaaagactatctccaaggccaagggccaacctagggagccccaggtgtacacgttgcctccttcccgcgaagaaatgactaagaaccaggtgtcgctgacctgtctcgtgaaagggttctacccctctgacatcgccgtggaatgggagtcaaacggacagcctgagaacaactataagaccacaccacctgtcctggactccgacggctccttcttcctgtactcaaagttgaccgtggacaagtcgcggtggcaacagggcaacgtgttctcttgctccgtgatgcacgaagccctgcacaaccactacacccaaaagtcgctcagcctctcccccggaaag

SEQ ID NO: 2654 - protein, 458 aa, Artificial Sequence
  Description of Artificial Sequence: Synthetic polypeptide
QVQLQQSGPGLVKPSQTLSLTCAISGDSVSSSSAAWNWIRQSPSRGLEWLGHIGYRSKWYNEYAVSVKSRITINPDTSKNQFSLQLNSVTPEDTAVYYCARGMYGSVPYKEGYYFDIWGQGTLVTVSSASTKGPSVFPLAPSSKSTSGGTAALGCLVKDYFPEPVTVSWNSGALTSGVHTFPAVLQSSGLYSLSSVVTVPSSSLGTQTYICNVNHKPSNTKVDKRVEPKSCDKTHTCPPCPAPELLGGPSVFLFPPKPKDTLMISRTPEVTCVVVDVSHEDPEVKFNWYVDGVEVHNAKTKPREEQYNSTYRVVSVLTVLHQDWLNGKEYKCKVSNKALPAPIEKTISKAKGQPREPQVYTLPPSREEMTKNQVSLTCLVKGFYPSDIAVEWESNGQPENNYKTTPPVLDSDGSFFLYSKLTVDKSRWQQGNVFSCSVLHEALHSHYTQKSLSLSPGK

SEQ ID NO: 2655 - DNA, 1374 bp, Artificial Sequence
  Description of Artificial Sequence: Synthetic polynucleotide
caagtgcaactccagcagtcaggaccggggttggtcaagccttcgcagaccctgtccctcacttgcgccattagcggagattcggtgtcgtcgtcgtcagccgcctggaactggattagacagtccccttcccgagggctggagtggctgggccacatcggataccgcagcaagtggtacaacgaatacgccgtcagcgtgaagtcacgcatcaccatcaacccggatactagcaagaaccagttcagcctccagttgaactccgtgaccccggaggataccgccgtgtactactgtgcgcggggcatgtacggatccgtgccgtacaaggagggatactacttcgacatttggggccaggggactcttgtcaccgtgtcctcggcctccactaagggcccgtcagtgttcccccttgcgccatcctcgaagtcaacctccggaggaactgccgcactgggttgcctcgtgaaagactatttcccggaacccgtcactgtctcctggaactcaggagcgctcaccagcggagtgcatacctttcctgcggtgctgcagtccagcggcctgtactccctgagctccgtcgtgaccgtcccctcgtcgtccctgggaacccaaacctacatttgcaacgtcaatcacaagccaagcaacactaaggtggacaagagagtggagcccaagtcctgcgataagacccacacctgtcctccctgtccggcacctgaactgcttggtggaccttccgtgttcctgttcccgcccaagccaaaagacaccctgatgatctcccgcactccggaagtcacttgcgtggtcgtggacgtgtcccacgaggaccccgaggtcaagtttaattggtacgtggacggagtggaagtgcacaacgccaagaccaagccgcgggaagaacagtacaactccacctaccgcgtggtgtccgtcctgactgtgctccaccaggactggctgaacggaaaggagtacaagtgcaaagtgtccaacaaggcactgccagcccctatcgaaaagactatctccaaggccaagggccaacctagggagccccaggtgtacacgttgcctccttcccgcgaagaaatgactaagaaccaggtgtcgctgacctgtctcgtgaaagggttctacccctctgacatcgccgtggaatgggagtcaaacggacagcctgagaacaactataagaccacaccacctgtcctggactccgacggctccttcttcctgtactcaaagttgaccgtggacaagtcgcggtggcaacagggcaacgtgttctcttgctccgtgctgcacgaagccctgcacagccactacacccaaaagtcgctcagcctctcccccggaaag

SEQ ID NO: 2656 - protein, 458 aa, Artificial Sequence
  Description of Artificial Sequence: Synthetic polypeptide
QVQLQQSGPGLVKPSQTLSLTCAISGDSVSSSSAAWNWIRQSPSRGLEWLGHIGYRSKWYNEYAVSVKSRITINPDTSKNQFSLQLNSVTPEDTAVYYCARGMYGSVPYKEGYYFDIWGQGTLVTVSSASTKGPSVFPLAPSSKSTSGGTAALGCLVKDYFPEPVTVSWNSGALTSGVHTFPAVLQSSGLYSLSSVVTVPSSSLGTQTYICNVNHKPSNTKVDKRVEPKSCDKTHTCPPCPAPELLGGPSVFLFPPKPKDTLMISRTPEVTCVVVAVSHEDPEVKFNWYVDGVEVHNAKTKPREEQYNSTYRVVSVLTVLHQDWLNGKEYKCKVSNKALAAPIEKTISKAKGQPREPQVYTLPPSREEMTKNQVSLTCLVKGFYPSDIAVEWESNGQPENNYKTTPPVLDSDGSFFLYSKLTVDKSRWQQGNVFSCSVLHEALHSHYTQKSLSLSPGK

SEQ ID NO: 2657 - DNA, 1374 bp, Artificial Sequence
  Description of Artificial Sequence: Synthetic polynucleotide
caagtgcaactccagcagtcaggaccggggttggtcaagccttcgcagaccctgtccctcacttgcgccattagcggagattcggtgtcgtcgtcgtcagccgcctggaactggattagacagtccccttcccgagggctggagtggctgggccacatcggataccgcagcaagtggtacaacgaatacgccgtcagcgtgaagtcacgcatcaccatcaacccggatactagcaagaaccagttcagcctccagttgaactccgtgaccccggaggataccgccgtgtactactgtgcgcggggcatgtacggatccgtgccgtacaaggagggatactacttcgacatttggggccaggggactcttgtcaccgtgtcctcggcctccactaagggcccgtcagtgttcccccttgcgccatcctcgaagtcaacctccggaggaactgccgcactgggttgcctcgtgaaagactatttcccggaacccgtcactgtctcctggaactcaggagcgctcaccagcggagtgcatacctttcctgcggtgctgcagtccagcggcctgtactccctgagctccgtcgtgaccgtcccctcgtcgtccctgggaacccaaacctacatttgcaacgtcaatcacaagccaagcaacactaaggtggacaagagagtggagcccaagtcctgcgataagacccacacctgtcctccctgtccggcacctgaactgcttggtggaccttccgtgttcctgttcccgcccaagccaaaagacaccctgatgatctcccgcactccggaagtcacttgcgtggtcgtggccgtgtcccacgaggaccccgaggtcaagtttaattggtacgtggacggagtggaagtgcacaacgccaagaccaagccgcgggaagaacagtacaactccacctaccgcgtggtgtccgtcctgactgtgctccaccaggactggctgaacggaaaggagtacaagtgcaaagtgtccaacaaggcactggctgcccctatcgaaaagactatctccaaggccaagggccaacctagggagccccaggtgtacacgttgcctccttcccgcgaagaaatgactaagaaccaggtgtcgctgacctgtctcgtgaaagggttctacccctctgacatcgccgtggaatgggagtcaaacggacagcctgagaacaactataagaccacaccacctgtcctggactccgacggctccttcttcctgtactcaaagttgaccgtggacaagtcgcggtggcaacagggcaacgtgttctcttgctccgtgctgcacgaagccctgcacagccactacacccaaaagtcgctcagcctctcccccggaaag

SEQ ID NO: 2658 - protein, 458 aa, Artificial Sequence
  Description of Artificial Sequence: Synthetic polypeptide
QVQLQQSGPGLVKPSQTLSLTCAISGDSVSSSSAAWNWIRQSPSRGLEWLGHIGYRSKWYNEYAVSVKSRITINPDTSKNQFSLQLNSVTPEDTAVYYCARGMYGSVPYKEGYYFDIWGQGTLVTVSSASTKGPSVFPLAPSSKSTSGGTAALGCLVKDYFPEPVTVSWNSGALTSGVHTFPAVLQSSGLYSLSSVVTVPSSSLGTQTYICNVNHKPSNTKVDKRVEPKSCDKTHTCPPCPAPELLGGPSVFLFPPKPKDTLYITREPEVTCVVVDVSHEDPEVKFNWYVDGVEVHNAKTKPREEQYNSTYRVVSVLTVLHQDWLNGKEYKCKVSNKALPAPIEKTISKAKGQPREPQVYTLPPSREEMTKNQVSLTCLVKGFYPSDIAVEWESNGQPENNYKTTPPVLDSDGSFFLYSKLTVDKSRWQQGNVFSCSVMHEALHNHYTQKSLSLSPGK

SEQ ID NO: 2659 - DNA, 1374 bp, Artificial Sequence
  Description of Artificial Sequence: Synthetic polynucleotide
caagtgcaactccagcagtcaggaccggggttggtcaagccttcgcagaccctgtccctcacttgcgccattagcggagattcggtgtcgtcgtcgtcagccgcctggaactggattagacagtccccttcccgagggctggagtggctgggccacatcggataccgcagcaagtggtacaacgaatacgccgtcagcgtgaagtcacgcatcaccatcaacccggatactagcaagaaccagttcagcctccagttgaactccgtgaccccggaggataccgccgtgtactactgtgcgcggggcatgtacggatccgtgccgtacaaggagggatactacttcgacatttggggccaggggactcttgtcaccgtgtcctcggcctccactaagggcccgtcagtgttcccccttgcgccatcctcgaagtcaacctccggaggaactgccgcactgggttgcctcgtgaaagactatttcccggaacccgtcactgtctcctggaactcaggagcgctcaccagcggagtgcatacctttcctgcggtgctgcagtccagcggcctgtactccctgagctccgtcgtgaccgtcccctcgtcgtccctgggaacccaaacctacatttgcaacgtcaatcacaagccaagcaacactaaggtggacaagagagtggagcccaagtcctgcgataagacccacacctgtcctccctgtccggcacctgaactgcttggtggaccttccgtgttcctgttcccgcccaagccaaaagacaccctgtatatcactcgcgaaccggaagtcacttgcgtggtcgtggacgtgtcccacgaggaccccgaggtcaagtttaattggtacgtggacggagtggaagtgcacaacgccaagaccaagccgcgggaagaacagtacaactccacctaccgcgtggtgtccgtcctgactgtgctccaccaggactggctgaacggaaaggagtacaagtgcaaagtgtccaacaaggcactgccagcccctatcgaaaagactatctccaaggccaagggccaacctagggagccccaggtgtacacgttgcctccttcccgcgaagaaatgactaagaaccaggtgtcgctgacctgtctcgtgaaagggttctacccctctgacatcgccgtggaatgggagtcaaacggacagcctgagaacaactataagaccacaccacctgtcctggactccgacggctccttcttcctgtactcaaagttgaccgtggacaagtcgcggtggcaacagggcaacgtgttctcttgctccgtgatgcacgaagccctgcacaaccactacacccaaaagtcgctcagcctctcccccggaaag

SEQ ID NO: 2660 - protein, 9 aa, Artificial Sequence
  Description of Artificial Sequence: Synthetic peptide
QQHGHSPTT

SEQ ID NO: 2661 - protein, 6 aa, Artificial Sequence
  Description of Artificial Sequence: Synthetic peptide
HGHSPT

SEQ ID NO: 2662 - protein, 107 aa, Artificial Sequence
  Description of Artificial Sequence: Synthetic polypeptide
DIQMTQSPSSLSASVGDRVTITCRASQDISNYLAWYQQKPGKAPKLLIYRASSLQSGVPSRFSGSGSGTDFTLTISSLQPEDFATYYCQQHGHSPTTFGQGTKVEIK

SEQ ID NO: 2663 - DNA, 321 bp, Artificial Sequence
  Description of Artificial Sequence: Synthetic polynucleotide
gatatccagatgacccagagcccgagcagcctgagcgccagcgtgggcgatcgcgtgaccattacctgcagagccagccaggacatttctaactacctggcttggtaccagcagaaaccgggcaaagcgccgaaactattaatctaccgtgcttcttctctgcaaagcggcgtgccgagccgctttagcggcagcggatccggcaccgatttcaccctgaccattagctctctgcaaccggaagactttgcgacctattattgccagcagcatggtcattctccgactacctttggccagggcacgaaagttgaaattaaa

SEQ ID NO: 2664 - protein, 214 aa, Artificial Sequence
  Description of Artificial Sequence: Synthetic polypeptide
DIQMTQSPSSLSASVGDRVTITCRASQDISNYLAWYQQKPGKAPKLLIYRASSLQSGVPSRFSGSGSGTDFTLTISSLQPEDFATYYCQQHGHSPTTFGQGTKVEIKRTVAAPSVFIFPPSDEQLKSGTASVVCLLNNFYPREAKVQWKVDNALQSGNSQESVTEQDSKDSTYSLSSTLTLSKADYEKHKVYACEVTHQGLSSPVTKSFNRGEC

SEQ ID NO: 2665 - DNA, 642 bp, Artificial Sequence
  Description of Artificial Sequence: Synthetic polynucleotide
gatatccagatgacccagagcccgagcagcctgagcgccagcgtgggcgatcgcgtgaccattacctgcagagccagccaggacatttctaactacctggcttggtaccagcagaaaccgggcaaagcgccgaaactattaatctaccgtgcttcttctctgcaaagcggcgtgccgagccgctttagcggcagcggatccggcaccgatttcaccctgaccattagctctctgcaaccggaagactttgcgacctattattgccagcagcatggtcattctccgactacctttggccagggcacgaaagttgaaattaaacgtacggtggccgctcccagcgtgttcatcttcccccccagcgacgagcagctgaagagcggcaccgccagcgtggtgtgcctgctgaacaacttctacccccgggaggccaaggtgcagtggaaggtggacaacgccctgcagagcggcaacagccaggaaagcgtcaccgagcaggacagcaaggactccacctacagcctgagcagcaccctgaccctgagcaaggccgactacgagaagcacaaggtgtacgcctgcgaggtgacccaccagggcctgtccagccccgtgaccaagagcttcaaccggggcgagtgt

SEQ ID NO: 2666 - protein, 12 aa, Artificial Sequence
  Description of Artificial Sequence: Synthetic peptide
GFSLSTSGVGVS

SEQ ID NO: 2667 - protein, 16 aa, Artificial Sequence
  Description of Artificial Sequence: Synthetic peptide
LIFSDHDKIYSTSLKT

SEQ ID NO: 2668 - protein, 11 aa, Artificial Sequence
  Description of Artificial Sequence: Synthetic peptide
TLIDRSVYFDY

SEQ ID NO: 2669 - protein, 7 aa, Artificial Sequence
  Description of Artificial Sequence: Synthetic peptide
TSGVGVS

SEQ ID NO: 2670 - protein, 9 aa, Artificial Sequence
  Description of Artificial Sequence: Synthetic peptide
GFSLSTSGV

SEQ ID NO: 2671 - protein, 5 aa, Artificial Sequence
  Description of Artificial Sequence: Synthetic peptide
FSDHD

SEQ ID NO: 2672 - protein, 10 aa, Artificial Sequence
  Description of Artificial Sequence: Synthetic peptide
GFSLSTSGVG

SEQ ID NO: 2673 - protein, 7 aa, Artificial Sequence
  Description of Artificial Sequence: Synthetic peptide
IFSDHDK

SEQ ID NO: 2674 - protein, 13 aa, Artificial Sequence
  Description of Artificial Sequence: Synthetic peptide
ARTLIDRSVYFDY

SEQ ID NO: 2675 - protein, 121 aa, Artificial Sequence
  Description of Artificial Sequence: Synthetic polypeptide
QVQLKESGPALVKPTQTLTLTCTFSGFSLSTSGVGVSWIRQPPGKALEWLALIFSDHDKIYSTSLKTRLTISKDTSKNQVVLTMTNMDPVDTATYYCARTLIDRSVYFDYWGQGTLVTVSS

SEQ ID NO: 2676 - DNA, 363 bp, Artificial Sequence
  Description of Artificial Sequence: Synthetic polynucleotide
caggtgcaattgaaagaaagcggtccggcgctggtgaaaccgacccagaccctgaccctgacgtgcaccttttccggattcagcctgtctacttccggtgttggtgtgagctggattcgccagccgccgggcaaagcgctcgagtggctggcgctgatcttctctgaccatgacaagatctatagcaccagcctgaaaacccgtctgaccattagcaaagatacttcgaaaaaccaggtggtgctgaccatgaccaacatggacccggtggataccgcgacctattattgcgcgcgtactctgatcgaccgttctgtttacttcgattactggggccaaggcaccctggtgactgttagctca

SEQ ID NO: 2677 - protein, 451 aa, Artificial Sequence
  Description of Artificial Sequence: Synthetic polypeptide
QVQLKESGPALVKPTQTLTLTCTFSGFSLSTSGVGVSWIRQPPGKALEWLALIFSDHDKIYSTSLKTRLTISKDTSKNQVVLTMTNMDPVDTATYYCARTLIDRSVYFDYWGQGTLVTVSSASTKGPSVFPLAPSSKSTSGGTAALGCLVKDYFPEPVTVSWNSGALTSGVHTFPAVLQSSGLYSLSSVVTVPSSSLGTQTYICNVNHKPSNTKVDKRVEPKSCDKTHTCPPCPAPEAAGGPSVFLFPPKPKDTLMISRTPEVTCVVVDVSHEDPEVKFNWYVDGVEVHNAKTKPREEQYNSTYRVVSVLTVLHQDWLNGKEYKCKVSNKALPAPIEKTISKAKGQPREPQVYTLPPSREEMTKNQVSLTCLVKGFYPSDIAVEWESNGQPENNYKTTPPVLDSDGSFFLYSKLTVDKSRWQQGNVFSCSVMHEALHNHYTQKSLSLSPGK

SEQ ID NO: 2678 - DNA, 1353 bp, Artificial Sequence
  Description of Artificial Sequence: Synthetic polynucleotide
caggtgcaattgaaagaaagcggtccggcgctggtgaaaccgacccagaccctgaccctgacgtgcaccttttccggattcagcctgtctacttccggtgttggtgtgagctggattcgccagccgccgggcaaagcgctcgagtggctggcgctgatcttctctgaccatgacaagatctatagcaccagcctgaaaacccgtctgaccattagcaaagatacttcgaaaaaccaggtggtgctgaccatgaccaacatggacccggtggataccgcgacctattattgcgcgcgtactctgatcgaccgttctgtttacttcgattactggggccaaggcaccctggtgactgttagctcagcctccaccaagggtccatcggtcttccccctggcaccctcctccaagagcacctctgggggcacagcggccctgggctgcctggtcaaggactacttccccgaaccggtgacggtgtcgtggaactcaggcgccctgaccagcggcgtgcacaccttcccggctgtcctacagtcctcaggactctactccctcagcagcgtggtgaccgtgccctccagcagcttgggcacccagacctacatctgcaacgtgaatcacaagcccagcaacaccaaggtggacaagagagttgagcccaaatcttgtgacaaaactcacacatgcccaccgtgcccagcacctgaagcagcggggggaccgtcagtcttcctcttccccccaaaacccaaggacaccctcatgatctcccggacccctgaggtcacatgcgtggtggtggacgtgagccacgaagaccctgaggtcaagttcaactggtacgtggacggcgtggaggtgcataatgccaagacaaagccgcgggaggagcagtacaacagcacgtaccgggtggtcagcgtcctcaccgtcctgcaccaggactggctgaatggcaaggagtacaagtgcaaggtctccaacaaagccctcccagcccccatcgagaaaaccatctccaaagccaaagggcagccccgagaaccacaggtgtacaccctgcccccatcccgggaggagatgaccaagaaccaggtcagcctgacctgcctggtcaaaggcttctatcccagcgacatcgccgtggagtgggagagcaatgggcagccggagaacaactacaagaccacgcctcccgtgctggactccgacggctccttcttcctctacagcaagctcaccgtggacaagagcaggtggcagcaggggaacgtcttctcatgctccgtgatgcatgaggctctgcacaaccactacacgcagaagagcctctccctgtctccgggtaaa

SEQ ID NO: 2679 - protein, 13 aa, Artificial Sequence
  Description of Artificial Sequence: Synthetic peptide
SGSSSNIGHHYVS

SEQ ID NO: 2680 - protein, 7 aa, Artificial Sequence
  Description of Artificial Sequence: Synthetic peptide
DNTNRPS

SEQ ID NO: 2681 - protein, 11 aa, Artificial Sequence
  Description of Artificial Sequence: Synthetic peptide
ATWDGLMNSIV

SEQ ID NO: 2682 - protein, 9 aa, Artificial Sequence
  Description of Artificial Sequence: Synthetic peptide
SSSNIGHHY

SEQ ID NO: 2683 - protein, 3 aa, Artificial Sequence
  Description of Artificial Sequence: Synthetic peptide
DNT

SEQ ID NO: 2684 - protein, 8 aa, Artificial Sequence
  Description of Artificial Sequence: Synthetic peptide
WDGLMNSI

SEQ ID NO: 2685 - protein, 8 aa, Artificial Sequence
  Description of Artificial Sequence: Synthetic peptide
SSNIGHHY

SEQ ID NO: 2686 - protein, 110 aa, Artificial Sequence
  Description of Artificial Sequence: Synthetic polypeptide
DIVLTQPPSVSGAPGQRVTISCSGSSSNIGHHYVSWYQQLPGTAPKLLIYDNTNRPSGVPDRFSGSKSGTSASLAITGLQAEDEADYYCATWDGLMNSIVFGGGTKLTVL

SEQ ID NO: 2687 - DNA, 330 bp, Artificial Sequence
  Description of Artificial Sequence: Synthetic polynucleotide
gatatcgtgctgacccagccgccgagcgtgagcggtgcaccgggccagcgcgtgaccattagctgtagcggcagcagcagcaacattggtcatcattacgtgtcttggtaccagcagctgccgggcacggcgccgaaactgctgatctacgacaacactaaccgcccgagcggcgtgccggatcgctttagcggatccaaaagcggcaccagcgccagcctggcgattaccggcctgcaagcagaagacgaagcggattattactgcgctacttgggacggtctgatgaactctatcgtgtttggcggcggcacgaagttaaccgtccta

SEQ ID NO: 2688 - protein, 216 aa, Artificial Sequence
  Description of Artificial Sequence: Synthetic polypeptide
DIVLTQPPSVSGAPGQRVTISCSGSSSNIGHHYVSWYQQLPGTAPKLLIYDNTNRPSGVPDRFSGSKSGTSASLAITGLQAEDEADYYCATWDGLMNSIVFGGGTKLTVLGQPKAAPSVTLFPPSSEELQANKATLVCLISDFYPGAVTVAWKADSSPVKAGVETTTPSKQSNNKYAASSYLSLTPEQWKSHRSYSCQVTHEGSTVEKTVAPTECS

SEQ ID NO: 2689 - DNA, 648 bp, Artificial Sequence
  Description of Artificial Sequence: Synthetic polynucleotide
gatatcgtgctgacccagccgccgagcgtgagcggtgcaccgggccagcgcgtgaccattagctgtagcggcagcagcagcaacattggtcatcattacgtgtcttggtaccagcagctgccgggcacggcgccgaaactgctgatctacgacaacactaaccgcccgagcggcgtgccggatcgctttagcggatccaaaagcggcaccagcgccagcctggcgattaccggcctgcaagcagaagacgaagcggattattactgcgctacttgggacggtctgatgaactctatcgtgtttggcggcggcacgaagttaaccgtcctaggtcagcccaaggctgccccctcggtcactctgttcccgccctcctctgaggagcttcaagccaacaaggccacactggtgtgtctcataagtgacttctacccgggagccgtgacagtggcctggaaggcagatagcagccccgtcaaggcgggagtggagaccaccacaccctccaaacaaagcaacaacaagtacgcggccagcagctatctgagcctgacgcctgagcagtggaagtcccacagaagctacagctgccaggtcacgcatgaagggagcaccgtggagaagacagtggcccctacagaatgttca

SEQ ID NO: 2690 - protein, 118 aa, Artificial Sequence
  Description of Artificial Sequence: Synthetic polypeptide
EVKLLDSGGGLVQAGGSLRLSCAGSGFTFTDFYMSWIRQPPGKAPEWLGVIRNKANGYTAGYNPSVKGRFTISRDNTQNILYLQMNTLRAEDTAIYYCARLSYGFDYWGQGVMVTVSS

SEQ ID NO: 2691 - protein, 112 aa, Artificial Sequence
  Description of Artificial Sequence: Synthetic polypeptide
DIVMTQGALPNPVPSGESASITCQSSKSLLHSNGKTYLNWYLQRPGQSPQLLIYWMSTRASGVSDRFSGSGSGTDFTLKISSVEAEDVGVYYCQQFLEFPFTFGSGTKLEIK

SEQ ID NO: 2692 - protein, 10 aa, Artificial Sequence
  Description of Artificial Sequence: Synthetic peptide
GFTFTDFYMS

SEQ ID NO: 2693 - protein, 19 aa, Artificial Sequence
  Description of Artificial Sequence: Synthetic peptide
VIRNKANGYTAGYNPSVKG

SEQ ID NO: 2694 - protein, 9 aa, Artificial Sequence
  Description of Artificial Sequence: Synthetic peptide
ARLSYGFDY

SEQ ID NO: 2695 - protein, 16 aa, Artificial Sequence
  Description of Artificial Sequence: Synthetic peptide
QSSKSLLHSNGKTYLN

SEQ ID NO: 2696 - protein, 7 aa, Artificial Sequence
  Description of Artificial Sequence: Synthetic peptide
WMSTRAS

SEQ ID NO: 2697 - protein, 9 aa, Artificial Sequence
  Description of Artificial Sequence: Synthetic peptide
QQFLEFPFT

SEQ ID NO: 2698 - protein, 118 aa, Artificial Sequence
  Description of Artificial Sequence: Synthetic polypeptide
EVKLLESGGGLVQPGGSLRLSCAASGFTFTNFYMSWIRQPPGRAPEWLGVIRNRPNGYTTDYNPSVKGRFTISRDNTQNILYLQMSTLRADDTAFYYCTRLTYGFDYWGQGVMVTVSS

SEQ ID NO: 2699 - protein, 112 aa, Artificial Sequence
  Description of Artificial Sequence: Synthetic polypeptide
DIVMTQGALPNPVPSGESASITCQSSKSLLHSNGKTYLNWYLQRPGQSPQLLIYWMSTRASGVSDRFSGSGSGTDFTLKISSVEAEVVGVYYCQQFLEFPFTFGSGTKLEIK

SEQ ID NO: 2700 - protein, 10 aa, Artificial Sequence
  Description of Artificial Sequence: Synthetic peptide
GFTFTNFYMS

SEQ ID NO: 2701 - protein, 19 aa, Artificial Sequence
  Description of Artificial Sequence: Synthetic peptide
VIRNRPNGYTTDYNPSVKG

SEQ ID NO: 2702 - protein, 9 aa, Artificial Sequence
  Description of Artificial Sequence: Synthetic peptide
TRLTYGFDY

SEQ ID NO: 2703 - protein, 118 aa, Artificial Sequence
  Description of Artificial Sequence: Synthetic polypeptide
EVKLLDSGGGLVQAGGSLRLSCAGSGFTFTDFYMSWIRQPPGKAPEWLGVIRNKANGYTAGYNPSVKGRFTISRDNTQNILYLQMNTLRAEDTAIYYCARLTYGFDYWGQGVMVTVSS

SEQ ID NO: 2704 - protein, 112 aa, Artificial Sequence
  Description of Artificial Sequence: Synthetic polypeptide
DIVMTQGALPNPVPSGESASITCQSSKSLLHSNGKTYLNWYLQRPGQSPQLLIYWMSTRASGVSDRFSGSGSGTDFTLKISSVEAEDVGVYYCQQFLEYPFTFGSGTKLEIK

SEQ ID NO: 2705 - protein, 9 aa, Artificial Sequence
  Description of Artificial Sequence: Synthetic peptide
ARLTYGFDY

SEQ ID NO: 2706 - protein, 9 aa, Artificial Sequence
  Description of Artificial Sequence: Synthetic peptide
QQFLEYPFT

SEQ ID NO: 2707 - protein, 118 aa, Artificial Sequence
  Description of Artificial Sequence: Synthetic polypeptide
EVQLVESGGGLVQPGGSLRLSCAASGFTFTDFYMSWVRQAPGKGLEWVSVIRNKANGYTAGYNPSVKGRFTISRDNSKNTLYLQMNSLRAEDTAVYYCARLTYGFDYWGQGTLVTVSS

SEQ ID NO: 2708 - protein, 112 aa, Artificial Sequence
  Description of Artificial Sequence: Synthetic polypeptide
DIVMTQTPLSLPVTPGEPASISCQSSKSLLHSNGKTYLNWYLQKPGQSPQLLIYWMSTRASGVPDRFSGSGSGTDFTLKISRVEAEDVGVYYCQQFLEYPFTFGQGTKVEIK

SEQ ID NO: 2709 - protein, 118 aa, Artificial Sequence
  Description of Artificial Sequence: Synthetic polypeptide
EVQLVESGGGLVQPGGSLRLSCAGSGFTFTDFYMSWVRQAPGKGLEWVSVIRNKANGYTAGYNPSVKGRFTISRDNSKNTLYLQMNSLRAEDTAVYYCARLTYGFDYWGQGTLVTVSS

SEQ ID NO: 2710 - protein, 112 aa, Artificial Sequence
  Description of Artificial Sequence: Synthetic polypeptide
DIVMTQTPLSLPVTPGEPASISCQSSKSLLHSTGKTYLNWYLQKPGQSPQLLIYWMSTRASGVPDRFSGSGSGTDFTLKISRVEAEDVGVYYCQQFLEYPFTFGQGTKVEIK

SEQ ID NO: 2711 - protein, 16 aa, Artificial Sequence
  Description of Artificial Sequence: Synthetic peptide
QSSKSLLHSTGKTYLN

SEQ ID NO: 2712 - protein, 118 aa, Artificial Sequence
  Description of Artificial Sequence: Synthetic polypeptide
EVQLVESGGGLVQPGGSLRLSCAASGFTFTDFYMSWVRQAPGKGLEWVSVIRNKANAYTAGYNPSVKGRFTISRDNSKNTLYLQMNSLRAEDTAVYYCARLTYGFDYWGQGTLVTVSS

SEQ ID NO: 2713 - protein, 19 aa, Artificial Sequence
  Description of Artificial Sequence: Synthetic peptide
VIRNKANAYTAGYNPSVKG

SEQ ID NO: 2714 - protein, 118 aa, Artificial Sequence
  Description of Artificial Sequence: Synthetic polypeptide
EVQLVESGGGLVQPGGSLRLSCAGSGFTFTDFYMSWVRQAPGKGPEWLSVIRNKANAYTAGYNPSVKGRFTISRDNSKNTLYLQMNSLRAEDTAVYYCARLTYGFDYWGQGTLVTVSS

SEQ ID NO: 2715 - protein, 120 aa, Artificial Sequence
  Description of Artificial Sequence: Synthetic polypeptide
EVQLQQSGAELVRSGASVKLSCTASGFSIEDFYIHWVKQRPEQGLEWIGWIDPENGDSKYAPKFQGKATMTADTSSNTAYLHLSSLTSEDTAVYYCHADHGNYGSTMDYWGQGTSVTVSS

SEQ ID NO: 2716 - protein, 107 aa, Artificial Sequence
  Description of Artificial Sequence: Synthetic polypeptide
DIQMNQSPSSLSASLGDTVTITCHASQHINVWLSWYQQKPGDHPKLLIYKASNLHTGVPSRFSGSGSGTGFTLTISSLQPEDIATYYCQQGQTYPRTFGGGTKLEIK

SEQ ID NO: 2717 - protein, 10 aa, Artificial Sequence
  Description of Artificial Sequence: Synthetic peptide
GFSIEDFYIH

SEQ ID NO: 2718 - protein, 17 aa, Artificial Sequence
  Description of Artificial Sequence: Synthetic peptide
WIDPENGDSKYAPKFQG

SEQ ID NO: 2719 - protein, 13 aa, Artificial Sequence
  Description of Artificial Sequence: Synthetic peptide
HADHGNYGSTMDY

SEQ ID NO: 2720 - protein, 11 aa, Artificial Sequence
  Description of Artificial Sequence: Synthetic peptide
HASQHINVWLS

SEQ ID NO: 2721 - protein, 7 aa, Artificial Sequence
  Description of Artificial Sequence: Synthetic peptide
KASNLHT

SEQ ID NO: 2722 - protein, 9 aa, Artificial Sequence
  Description of Artificial Sequence: Synthetic peptide
QQGQTYPRT

SEQ ID NO: 2723 - protein, 120 aa, Artificial Sequence
  Description of Artificial Sequence: Synthetic polypeptide
QVQLVQSGAEVKKPGASVKVSCKASGFSIEDFYIHWVRQAPGQGLEWMGWIDPENGDSKYAPKFQGRATITADTSTSTAYMELSSLRSEDTAVYYCHADHGNYGSTMDYWGQGTLVTVSS

SEQ ID NO: 2724 - protein, 107 aa, Artificial Sequence
  Description of Artificial Sequence: Synthetic polypeptide
DIQMTQSPSSLSASVGDRVTITCHASQHINVWLSWYQQKPGKAPKLLIYKASNLHTGVPSRFSGSGSGTDFTLTISSLQPEDFATYYCQQGQTYPRTFGQGTKVEIK

SEQ ID NO: 2725 - protein, 120 aa, Artificial Sequence
  Description of Artificial Sequence: Synthetic polypeptide
QVQLVQSGAEVKKPGASVKVSCKASGFSIEDFYIHWVRQAPGQGLEWMGWIDPENGDSKYAPKFQGRVTITADTSTSTAYMELSSLRSEDTAVYYCHADHGNYGSTMDYWGQGTLVTVSS

SEQ ID NO: 2726 - protein, 120 aa, Artificial Sequence
  Description of Artificial Sequence: Synthetic polypeptide
QVQLVQSGAEVKKPGASVKVSCKASGFSIEDFYIHWVRQAPGQGLEWMGWIDPEQGDSKYAPKFQGRATITADTSTSTAYMELSSLRSEDTAVYYCHADHGNYGSTMDYWGQGTLVTVSS

SEQ ID NO: 2727 - protein, 17 aa, Artificial Sequence
  Description of Artificial Sequence: Synthetic peptide
WIDPEQGDSKYAPKFQG

SEQ ID NO: 2728 - protein, 120 aa, Artificial Sequence
  Description of Artificial Sequence: Synthetic polypeptide
QVQLVQSGAEVKKPGASVKVSCKASGFSIEDFYIHWVRQAPGQGLEWMGWIDPENGESKYAPKFQGRATITADTSTSTAYMELSSLRSEDTAVYYCHADHGNYGSTMDYWGQGTLVTVSS

SEQ ID NO: 2729 - protein, 17 aa, Artificial Sequence
  Description of Artificial Sequence: Synthetic peptide
WIDPENGESKYAPKFQG

SEQ ID NO: 2730 - protein, 120 aa, Artificial Sequence
  Description of Artificial Sequence: Synthetic polypeptide
QVQLVQSGAEVKKPGASVKVSCKASGFSIEDFYIHWVRQAPGQGLEWMGWIDPEQGESKYAPKFQGRATITADTSTSTAYMELSSLRSEDTAVYYCHADHGNYGSTMDYWGQGTLVTVSS

SEQ ID NO: 2731 - protein, 17 aa, Artificial Sequence
  Description of Artificial Sequence: Synthetic peptide
WIDPEQGESKYAPKFQG

SEQ ID NO: 2732 - protein, 120 aa, Artificial Sequence
  Description of Artificial Sequence: Synthetic polypeptide
QVQLVQSGAEVKKPGASVKVSCKASGFSIEDFYIHWVRQAPGQGLEWMGWIDPEQGDSKYAPKFQGRVTITADTSTSTAYMELSSLRSEDTAVYYCHADHGNYGSTMDYWGQGTLVTVSS

SEQ ID NO: 2733 - protein, 120 aa, Artificial Sequence
  Description of Artificial Sequence: Synthetic polypeptide
QVQLVQSGAEVKKPGASVKVSCKASGFSIEDFYIHWVRQAPGQGLEWMGWIDPENGESKYAPKFQGRVTITADTSTSTAYMELSSLRSEDTAVYYCHADHGNYGSTMDYWGQGTLVTVSS

SEQ ID NO: 2734 - protein, 120 aa, Artificial Sequence
  Description of Artificial Sequence: Synthetic polypeptide
QVQLVQSGAEVKKPGASVKVSCKASGFSIEDFYIHWVRQAPGQGLEWMGWIDPEQGESKYAPKFQGRVTITADTSTSTAYMELSSLRSEDTAVYYCHADHGNYGSTMDYWGQGTLVTVSS

SEQ ID NO: 2735 - protein, 17 aa, Artificial Sequence
  Description of Artificial Sequence: Synthetic peptide
  MOD_RES (6)..(6): Asn or Gln
  MOD_RES (8)..(8): Asp or Glu
WIDPEXGXSKYAPKFQG

SEQ ID NO: 2736 - protein, 10 aa, Artificial Sequence
  Description of Artificial Sequence: Synthetic peptide
  MOD_RES (6)..(6): Asp or Asn
GFTFTXFYMS

SEQ ID NO: 2737 - protein, 19 aa, Artificial Sequence
  Description of Artificial Sequence: Synthetic peptide
  MOD_RES (5)..(5): Lys or Arg
  MOD_RES (6)..(6): Ala or Pro
  MOD_RES (8)..(8): Gly or Ala
  MOD_RES (11)..(11): Ala or Thr
  MOD_RES (12)..(12): Gly or Asp
VIRNXXNXYTXXYNPSVKG

SEQ ID NO: 2738 - protein, 9 aa, Artificial Sequence
  Description of Artificial Sequence: Synthetic peptide
  MOD_RES (1)..(1): Ala or Thr
  MOD_RES (4)..(4): Thr or Ser
XRLXYGFDY

SEQ ID NO: 2739 - protein, 16 aa, Artificial Sequence
  Description of Artificial Sequence: Synthetic peptide
  MOD_RES (10)..(10): Asn or Thr
QSSKSLLHSXGKTYLN

SEQ ID NO: 2740 - protein, 9 aa, Artificial Sequence
  Description of Artificial Sequence: Synthetic peptide
  MOD_RES (6)..(6): Tyr or Phe
QQFLEXPFT

SEQ ID NO: 2741 - protein, 112 aa, Artificial Sequence
  Description of Artificial Sequence: Synthetic polypeptide
DIVMTQSPDSLAVSLGERATINCQSSKSLLHSNGKTYLNWYQQKPGQPPKLLIYWMSTRASGVPDRFSGSGSGTDFTLTISSLQAEDVAVYYCQQFLEFPFTFGQGTKVEIK

SEQ ID NO: 2742 - protein, 7 aa, Artificial Sequence
  Description of Artificial Sequence: Synthetic peptide
FPGESES

SEQ ID NO: 2743 - protein, 9 aa, Artificial Sequence
  Description of Artificial Sequence: Synthetic peptide
GEKGPCQRV

SEQ ID NO: 2744 - protein, 12 aa, Artificial Sequence
  Description of Artificial Sequence: Synthetic peptide
TLRNLQPHDAGL

SEQ ID NO: 2745 - protein, 4 aa, Artificial Sequence
  Description of Artificial Sequence: Synthetic peptide
VEVL

SEQ ID NO: 2746 - protein, 107 aa, Artificial Sequence; identical to SEQ ID NO: 60
  Description of Artificial Sequence: Synthetic polypeptide

SEQ ID NO: 2747 - protein, 123 aa, Artificial Sequence; identical to SEQ ID NO: 123
  Description of Artificial Sequence: Synthetic polypeptide

SEQ ID NO: 2748 - protein, 107 aa, Artificial Sequence; identical to SEQ ID NO: 61
  Description of Artificial Sequence: Synthetic polypeptide

SEQ ID NO: 2749 - protein, 123 aa, Artificial Sequence; identical to SEQ ID NO: 124
  Description of Artificial Sequence: Synthetic polypeptide

SEQ ID NO: 2750 - protein, 112 aa, Artificial Sequence; identical to SEQ ID NO: 1819
  Description of Artificial Sequence: Synthetic polypeptide

SEQ ID NO: 2751 - protein, 123 aa, Artificial Sequence; identical to SEQ ID NO: 1766
  Description of Artificial Sequence: Synthetic polypeptide

SEQ ID NO: 2752 - protein, 118 aa, Artificial Sequence
  Description of Artificial Sequence: Synthetic polypeptide
EVQLVESGGGLVQPGGSLRLSCAGSGFTFTDFYMSWVRQAPGKGPEWLSVIRNKANGYTAGYNPSVKGRFTISRDNSKNTLYLQMNSLRAEDTAVYYCARLTYGFDYWGQGTLVTVSS

SEQ ID NO: 2753 - protein, 10 aa, Artificial Sequence
  Description of Artificial Sequence: Synthetic peptide
  Antibody 1 CDR-H1
GFSFNTYWIG

SEQ ID NO: 2754 - protein, 17 aa, Artificial Sequence
  Description of Artificial Sequence: Synthetic peptide
  Antibody 1 CDR-H2
IIYPGDQDIRYSPSFQG

SEQ ID NO: 2755 - protein, 18 aa, Artificial Sequence
  Description of Artificial Sequence: Synthetic peptide
  Antibody 1 CDR-H3
ARYGRYIYGYGGYHGMDV

SEQ ID NO: 2756 - protein, 11 aa, Artificial Sequence
  Description of Artificial Sequence: Synthetic peptide
  Antibody 1 CDR-L1
RASQAIRDDLG

SEQ ID NO: 2757 - protein, 8 aa, Artificial Sequence
  Description of Artificial Sequence: Synthetic peptide
  Antibody 1 CDR-L2
YAASSLQS

SEQ ID NO: 2758 - protein, 9 aa, Artificial Sequence
  Description of Artificial Sequence: Synthetic peptide
  Antibody 1 CDR-L3
LQNYNYPHT

SEQ ID NO: 2759 - protein, 125 aa, Artificial Sequence
  Description of Artificial Sequence: Synthetic polypeptide
  Antibody 1 VH
EVQLVQSGAEVKKPGESLKISCKGSGFSFNTYWIGWVRQMPGKGLEWMGIIYPGDQDIRYSPSFQGQVTISADKSISTAYLQWSSLKASDTAMYYCARYGRYIYGYGGYHGMDVWGQGTTVTVSS

SEQ ID NO: 2760 - protein, 107 aa, Artificial Sequence
  Description of Artificial Sequence: Synthetic polypeptide
  Antibody 1 VL
DIQMTQSPSSLSASVGDRVTITCRASQAIRDDLGWYQQKPGKAPKLLIYAASSLQSGVPSRFSGSGSGTDFTLTISSLQPEDFATYYCLQNYNYPHTFGQGTKLEIK

SEQ ID NO: 2761 - protein, 451 aa, Artificial Sequence
  Description of Artificial Sequence: Synthetic polypeptide
  Antibody 1 Heavy Chain
EVQLVQSGAEVKKPGESLKISCKGSGFSFNTYWIGWVRQMPGKGLEWMGIIYPGDQDIRYSPSFQGQVTISADKSISTAYLQWSSLKASDTAMYYCARYGRYIYGYGGYHGMDVWGQGTTVTVSSASTKGPSVFPLAPCSRSTSESTAALGCLVKDYFPEPVTVSWNSGALTSGVHTFPAVLQSSGLYSLSSVVTVPSSSLGTKTYTCNVDHKPSNTKVDKRVESKYGPPCPPCPAPEAAGGPSVFLFPPKPKDTLMISRTPEVTCVVVDVSQEDPEVQFNWYVDGVEVHNAKTKPREEQFNSTYRVVSVLTVLHQDWLNGKEYKCKVSNKGLPSSIEKTISKAKGQPREPQVYTLPPSQEEMTKNQVSLTCLVKGFYPSDIAVEWESNGQPENNYKTTPPVLDSDGSFFLYSRLTVDKSRWQEGNVFSCSVMHEALHNHYTQKSLSLSLG

SEQ ID NO: 2762 - protein, 214 aa, Artificial Sequence
  Description of Artificial Sequence: Synthetic polypeptide
  Antibody 1 Light Chain
DIQMTQSPSSLSASVGDRVTITCRASQAIRDDLGWYQQKPGKAPKLLIYAASSLQSGVPSRFSGSGSGTDFTLTISSLQPEDFATYYCLQNYNYPHTFGQGTKLEIKRTVAAPSVFIFPPSDEQLKSGTASVVCLLNNFYPREAKVQWKVDNALQSGNSQESVTEQDSKDSTYSLSSTLTLSKADYEKHKVYACEVTHQGLSSPVTKSFNRGEC

SEQ ID NO: 2763 - protein, 162 aa, Artificial Sequence
  Description of Artificial Sequence: Synthetic polypeptide
  Human TREM2 ECD-His
HNTTVFQGVAGQSLQVSCPYDSMKHWGRRKAWCRQLGEKGPCQRVVSTHNLWLLSFLRRWNGSTAITDDTLGGTLTITLRNLQPHDAGLYQCQSLHGSEADTLRKVLVEVLADPLDHRDAGDLWFPGESESFEDAHVEHSISRSLLEGEIPFPPTSHHHHHH

SEQ ID NO: 2764 - protein, 159 aa, Artificial Sequence
  Description of Artificial Sequence: Synthetic polypeptide
  Mouse TREM2 ECD-His
LNTTVLQGMAGQSLRVSCTYDALKHWGRRKAWCRQLGEEGPCQRVVSTHGVWLLAFLKKRNGSTVIADDTLAGTVTITLKNLQAGDAGLYQCQSLRGREAEVLQKVLVEVLEDPLDDQDAGDLWVPEESSSFEGAQVEHSTSRNQETSFPPTSHHHHHH

SEQ ID NO: 2765 - protein, 166 aa, Artificial Sequence
  Description of Artificial Sequence: Synthetic polypeptide
  Rat TREM2 ECD-His
NTTVFQGVAGQSLRVSCPYDSATHWGRRKAWCRQLGEEGPCERVVSTHSWWLLSFLKRRNGSTAITDDALGGTLTVTLRDLQAQDAGVYQCQSLQGREASTLQKILVEVLTEPLEHEHAGDFWVPEESGSFEDPPVERSSSRSPSEGEPSFPPASGGGGQHHHHHH

SEQ ID NO: 2766 - protein, 156 aa, Artificial Sequence
  Description of Artificial Sequence: Synthetic polypeptide
  Rabbit TREM2 ECD-His
NTTVLQGVAGQSLRVSCTYDALRHWGRRKAWCRQLAEEGPCQRVVSTHGVWLLAFLRKQNGSTVITDDTLAGTVTITLRNLQAGDAGLYQCQSLRGREAEVLQKVVVEVLEDPLDDQDAGDLWVPEESESFEGAQVEHSTSRSQSGGGGQHHHHHH

SEQ ID NO: 2767 - protein, 168 aa, Artificial Sequence
  Description of Artificial Sequence: Synthetic polypeptide
  Cynomolgus monkey TREM2 ECD-His
HNTTVFQGVEGQSLQVSCPYDSMKHWGRRKAWCRQLGEKGPCQRVVSTHNLWLLSFLRRRNGSTAITDDTLGGTLTITLRNLQPHDAGFYQCQSLHGSEADTLRKVLVEVLADPLDHRDAGDLWVPGESESFEDAHVEHSISRPSQGSHLPSCLSKEGGGGQHHHHHH

SEQ ID NO: 2768 - protein, 220 aa, Artificial Sequence
  Description of Artificial Sequence: Synthetic polypeptide
  24G6-1 (SST28347-1) LC
DIVMTQSPDSLAVSLGERATINCKSSQSVLYSSNNKHFLAWYQQKPGQPPKLLIYWASTRESGVPDRFSGSGSGTDFTLTISSLQAEDVAVYYCQQYYSTPLTFGGGTKVEIKRTVAAPSVFIFPPSDEQLKSGTASVVCLLNNFYPREAKVQWKVDNALQSGNSQESVTEQDSKDSTYSLSSTLTLSKADYEKHKVYACEVTHQGLSSPVTKSFNRGEC

SEQ ID NO: 2769 - protein, 449 aa, Artificial Sequence
  Description of Artificial Sequence: Synthetic polypeptide
  24G6-1 (SST28347-1) HC
EVQLLESGGGLVQPGGSLRLSCAASGFTFSSYAMSWVRQAPGKGLEWVSAISGSGGSTYYAESVKGRFTISRDNSKNTLYLQMNSLRAEDTAVYYCAKAYTPMAFFDYWGQGTLVTVSSASTKGPSVFPLAPSSKSTSGGTAALGCLVKDYFPEPVTVSWNSGALTSGVHTFPAVLQSSGLYSLSSVVTVPSSSLGTQTYICNVNHKPSNTKVDKKVEPKSCDKTHTCPPCPAPELLGGPSVFLFPPKPKDTLMISRTPEVTCVVVDVSHEDPEVKFNWYVDGVEVHNAKTKPCEEQYGSTYRCVSVLTVLHQDWLNGKEYKCKVSNKALPAPIEKTISKAKGQPREPQVYTLPPSREEMTKNQVSLTCLVKGFYPSDIAVEWESNGQPENNYKTTPPVLDSDGSFFLYSKLTVDKSRWQQGNVFSCSVMHEALHNHYTQKSLSLSPGK

SEQ ID NO: 2770 - protein, 445 aa, Artificial Sequence
  Description of Artificial Sequence: Synthetic polypeptide
  24G6-1 (SST28347-1) HC
EVQLLESGGGLVQPGGSLRLSCAASGFTFSSYAMSWVRQAPGKGLEWVSAISGSGGSTYYAESVKGRFTISRDNSKNTLYLQMNSLRAEDTAVYYCAKAYTPMAFFDYWGQGTLVTVSSASTKGPSVFPLAPSSRSTSESTAALGCLVKDYFPEPVTVSWNSGALTSGVHTFPAVLQSSGLYSLSSVVTVPSSNFGTQTYTCNVDHKPSNTKVDKTVERKCCVECPPCPAPELLGGPSVFLFPPKPKDTLMISRTPEVTCVVVDVSHEDPEVKFNWYVDGVEVHNAKTKPCEEQYGSTYRCVSVLTVLHQDWLNGKEYKCKVSNKALPAPIEKTISKAKGQPREPQVYTLPPSREEMTKNQVSLTCLVKGFYPSDIAVEWESNGQPENNYKTTPPVLDSDGSFFLYSKLTVDKSRWQQGNVFSCSVMHEALHNHYTQKSLSLSPG

SEQ ID NO: 2771 - protein, 214 aa, Artificial Sequence
  Description of Artificial Sequence: Synthetic polypeptide
  6E7-1 (SST29857-1) LC
DIQMTQSPSSVSASVGDRVTITCRASQGISSWLAWYQQKPGKAPKLLIYAASSLQSGVPSRFSGSGSGTDFTLTISSLQPEDFATYFCQQADAFPRTFGQGTKLEIKRTVAAPSVFIFPPSDEQLKSGTASVVCLLNNFYPREAKVQWKVDNALQSGNSQESVTEQDSKDSTYSLSSTLTLSKADYEKHKVYACEVTHQGLSSPVTKSFNRGEC

SEQ ID NO: 2772 - protein, 449 aa, Artificial Sequence
  Description of Artificial Sequence: Synthetic polypeptide
  6E7-1 (SST29857-1) HC
EVQLVQSGAEVKKPGESLKISCKGSGYSFTSYWIAWVRQMPGKGLEWMGIIYPGDADARYSPSFQGQVTISADKSISTAYLQWSSLKASDTAMYFCARQRTFYYDSSDYFDYWGQGTLVTVSSASTKGPSVFPLAPSSRSTSESTAALGCLVKDYFPEPVTVSWNSGALTSGVHTFPAVLQSSGLYSLSSVVTVPSSNFGTQTYTCNVDHKPSNTKVDKTVERKCCVECPPCPAPELLGGPSVFLFPPKPKDTLMISRTPEVTCVVVDVSHEDPEVKFNWYVDGVEVHNAKTKPCEEQYGSTYRCVSVLTVLHQDWLNGKEYKCKVSNKALPAPIEKTISKAKGQPREPQVYTLPPSREEMTKNQVSLTCLVKGFYPSDIAVEWESNGQPENNYKTTPPVLDSDGSFFLYSKLTVDKSRWQQGNVFSCSVMHEALHNHYTQKSLSLSPG

SEQ ID NO: 2773 - protein, 214 aa, Artificial Sequence
  Description of Artificial Sequence: Synthetic polypeptide
  13E7-1 (SST202443-1) LC
EIVMTQSPATLSVSPGERATLSCRASQSVSSNLAWFQQKPGQAPRLLIYGASTRATGIPARFSGSGSGTEFTLTISSLQPEDFAVYYCLQDNNFPPTFGQGTKVDIKRTVAAPSVFIFPPSDEQLKSGTASVVCLLNNFYPREAKVQWKVDNALQSGNSQESVTEQDSKDSTYSLSSTLTLSKADYEKHKVYACEVTHQGLSSPVTKSFNRGEC

SEQ ID NO: 2774 - protein, 450 aa, Artificial Sequence
  Description of Artificial Sequence: Synthetic polypeptide
  13E7-1 (SST202443-1) HC
EVQLVQSGAEVKKPGESLKISCKGSGYSFTSYWIGWVRQMPGKGLEWMGIIYPGDADARYSPSFQGQVTISADKSISTAYLQWSSLKASDTAMYFCARRRQGIFGDALDFWGQGTLVTVSSASTKGPSVFPLAPSSKSTSGGTAALGCLVKDYFPEPVTVSWNSGALTSGVHTFPAVLQSSGLYSLSSVVTVPSSSLGTQTYICNVNHKPSNTKVDKKVEPKSCDKTHTCPPCPAPELLGGPSVFLFPPKPKDTLMISRTPEVTCVVVDVSHEDPEVKFNWYVDGVEVHNAKTKPCEEQYGSTYRCVSVLTVLHQDWLNGKEYKCKVSNKALPAPIEKTISKAKGQPREPQVYTLPPSREEMTKNQVSLTCLVKGFYPSDIAVEWESNGQPENNYKTTPPVLDSDGSFFLYSKLTVDKSRWQQGNVFSCSVMHEALHNHYTQKSLSLSPG

SEQ ID NO: 2775 - protein, 214 aa, Artificial Sequence
  Description of Artificial Sequence: Synthetic polypeptide
  5E3-1 (SST29825-1) LC
DIQMTQSPSSLSASVGDRVTITCRASQGISNYLAWYQQKPGKAPKSLIYAASSLQSGVPSRFSGSGSGTDFTLTISSLQPEDFATYYCQQYSTYPFTFGQGTKVDIKRTVAAPSVFIFPPSDEQLKSGTASVVCLLNNFYPREAKVQWKVDNALQSGNSQESVTEQDSKDSTYSLSSTLTLSKADYEKHKVYACEVTHQGLSSPVTKSFNRGEC

SEQ ID NO: 2776 - protein, 447 aa, Artificial Sequence
  Description of Artificial Sequence: Synthetic polypeptide
  5E3-1 (SST29825-1) HC
QVQLVQSGAEVKKPGASVKVSCKASGYTFTGYYIHWVRQAPGQGLEWMGWINPYSGGTTSAQKFQGRVTMTRDTSTSSAYMELSRLRSDDTAVYYCARDAGYLALYGTDVWGQGTLVTVSSASTKGPSVFPLAPSSRSTSESTAALGCLVKDYFPEPVTVSWNSGALTSGVHTFPAVLQSSGLYSLSSVVTVPSSNFGTQTYTCNVDHKPSNTKVDKTVERKCCVECPPCPAPELLGGPSVFLFPPKPKDTLMISRTPEVTCVVVDVSHEDPEVKFNWYVDGVEVHNAKTKPCEEQYGSTYRCVSVLTVLHQDWLNGKEYKCKVSNKALPAPIEKTISKAKGQPREPQVYTLPPSREEMTKNQVSLTCLVKGFYPSDIAVEWESNGQPENNYKTTPPVLDSDGSFFLYSKLTVDKSRWQQGNVFSCSVMHEALHNHYTQKSLSLSPG

SEQ ID NO: 2777 - protein, 214 aa, Artificial Sequence; identical to SEQ ID NO: 2773
  Description of Artificial Sequence: Synthetic polypeptide
  13E7 Variant LC

SEQ ID NO: 2778 - protein, 451 aa, Artificial Sequence
  Description of Artificial Sequence: Synthetic polypeptide
  13E7 Variant HC
EVQLVQSGAEVKKPGESLKISCKGSGYSFTSYWIGWVRQMPGKGLEWMGIIYPGDADARYSPSFQGQVTISADKSISTAYLQWSSLKASDTAMYFCARRRQGIFGDALDFWGQGTLVTVSSASTKGPSVFPLAPSSKSTSGGTAALGCLVKDYFPEPVTVSWNSGALTSGVHTFPAVLQSSGLYSLSSVVTVPSSSLGTQTYICNVNHKPSNTKVDKKVEPKSCDKTHTCPPCPAPELLGGPSVFLFPPKPKDTLMISRTPEVTCVVVDVSHEDPEVKFNWYVDGVEVHNAKTKPCEEQYGSTYRCVSVLTVLHQDWLNGKEYKCKVSNKALPAPIEKTISKAKGQPREPQVYTLPPSREEMTKNQVSLTCLVKGFYPSDIAVEWESNGQPENNYKTTPPVLDSDGSFFLYSKLTVDKSRWQQGNVFSCSVMHEALHNHYTQKSLSLSPGK

SEQ ID NO: 2779 - protein, 445 aa, Artificial Sequence
  Description of Artificial Sequence: Synthetic polypeptide
  Murinized Ab-3 HC
EVQLVQSGAEVKKPGESLKISCKGSGYSFTSYWIGWVRQMPGKGLEWMGIIYPGDADARYSPSFQGQVTISADKSISTAYLQWSSLKASDTAMYFCARRRQGIFGDALDFWGQGTLVTVSSAKTTPPSVYPLAPGSAAQTNSMVTLGCLVKGYFPEPVTVTWNSGSLSSGVHTFPAVLQSDLYTLSSSVTVPSSTWPSETVTCNVAHPASSTKVDKKIVPRDCGCKPCICTVPEVSSVFIFPPKPKDVLTITLTPKVTCVVVDISKDDPEVQFSWFVDDVEVHTAQTQPREEQFGSTFRSVSELPIMHQDWLNGKEFKCRVNSAAFPAPIEKTISKTKGRPKAPQVYTIPPPKEQMAKDKVSLTCMITDFFPEDITVEWQWNGQPAENYKNTQPIMDTDGSYFVYSKLNVQKSNWEAGNTFTCSVLHEGLHNHHTEKSLSHSPGK

SEQ ID NO: 2780 - protein, 214 aa, Artificial Sequence
  Description of Artificial Sequence: Synthetic polypeptide
  Murinized Ab-2/Ab-3 LC
EIVMTQSPATLSVSPGERATLSCRASQSVSSNLAWFQQKPGQAPRLLIYGASTRATGIPARFSGSGSGTEFTLTISSLQPEDFAVYYCLQDNNFPPTFGQGTKVDIKRADAAPTVSIFPPSSEQLTSGGASVVCFLNNFYPKDINVKWKIDGSERQNGVLNSWTDQDSKDSTYSMSSTLTLTKDEYERHNSYTCEATHKTSTSPIVKSFNRNEC

SEQ ID NO: 2781 - protein, 445 aa, Artificial Sequence
  Description of Artificial Sequence: Synthetic polypeptide
  Murinized Ab-2 HC
EVQLVQSGAEVKKPGESLKISCKGSGYSFTSYWIGWVRQMPGKGLEWMGIIYPGDADARYSPSFQGQVTISADKSISTAYLQWSSLKASDTAMYFCARRRQGIFGDALDFWGQGTLVTVSSAKTTPPSVYPLAPGSAAQTNSMVTLGCLVKGYFPEPVTVTWNSGSLSSGVHTFPAVLQSDLYTLSSSVTVPSSPRPSETVTCNVAHPASSTKVDKKIVPRDCGCKPCICTVPEVSSVFIFPPKPKDVLTITLTPKVTCVVVDISKDDPEVQFSWFVDDVEVHTAQTQPREEQFNSTFRSVSELPIMHQDWLNGKEFKCRVNSAAFPAPIEKTISKTKGRPKAPQVYTIPPPKEQMAKDKVSLTCMITDFFPEDITVEWQWNGQPAENYKNTQPIMNTNGSYFVYSKLNVQKSNWEAGNTFTCSVLHEGLHNHHTEKSLSHSPGK
